United States Patent Application Publication US 2022/0211063 A1 - sequence listing, part 55

SEQ ID NO: 155 - DNA, 2041304 bp, Penicillium roqueforti
  misc_feature (6318)..(9203): n is a, c, g, or t
  misc_feature (163149)..(163253): n is a, c, g, or t
  misc_feature (224983)..(225353): n is a, c, g, or t
  misc_feature (232855)..(233751): n is a, c, g, or t
  misc_feature (335829)..(335957): n is a, c, g, or t
  misc_feature (386280)..(386449): n is a, c, g, or t
  misc_feature (488086)..(488286): n is a, c, g, or t
  misc_feature (690742)..(690908): n is a, c, g, or t
  misc_feature (738014)..(738133): n is a, c, g, or t
  misc_feature (751709)..(752171): n is a, c, g, or t
  misc_feature (756475)..(760010): n is a, c, g, or t
  misc_feature (768664)..(770161): n is a, c, g, or t
  misc_feature (808765)..(808791): n is a, c, g, or t
  misc_feature (904290)..(904524): n is a, c, g, or t
  misc_feature (906058)..(908545): n is a, c, g, or t
  misc_feature (912445)..(914508): n is a, c, g, or t
  misc_feature (922431)..(925161): n is a, c, g, or t
  misc_feature (1111708)..(1111727): n is a, c, g, or t
  misc_feature (1117905)..(1118036): n is a, c, g, or t
  misc_feature (1133025)..(1133137): n is a, c, g, or t
  misc_feature (1318181)..(1318181): n is a, c, g, or t
  misc_feature (1379524)..(1380175): n is a, c, g, or t
  misc_feature (1646601)..(1646747): n is a, c, g, or t
  misc_feature (1894887)..(1894906): n is a, c, g, or t
  misc_feature (1895449)..(1895665): n is a, c, g, or t
tatatcttttaaattaagttatataaagatctttatattaaatagttaatctatagtcttactaattaatagtaaggaatattagttcttaagatttaatatattaagtccctaataatctatatatagatataattttctatccttttttaatataaataaaataggtatatctattaagctttataataacttaatttagcctttcttaatatattctttaatataatcttaaaatactataagttttatcttaaaaagagagtaaattaatttataaggaatttatttacctacttttattttaataatataattatatttattactttctaataagttctctatttttttaaaattaaagatattagtctaatctatatattagataggtaaagctttctttataccttatattataataaagagtaggataggcttaccttttataattaaatagggatatattataagtataagggccttatagagaatctcttatataaaggctattatagttatccttttaatctttttattaaataagtaataatactatacctagtttttttagttaatattaggattaatagcttctaattaattaaatctaataattaggttatatcctattatcttaactactttataagagagtatatattaatatactatatctctactattttatagtttactatttagcttataggaattataggaatagactatagagctatctatagctataatagattttagggagcctatatctatatatagaaggtactatttaacctagttctaatttataaaggtctttttaactctactatctattagtatctatataatatatttagtaaataagctatacatataactgagctatataccctaaccaacctactggaatttaaatgtatttattttaaccataatactattaaatttattaaactaaaaagaatcatttatctagatatctattgatcttatgccctatctttctatacctactataccttagtatagcctatagatatggttttaaccccaattaagtacttctactaacctagtaattattttagaagcttcttagactaaaagaccctctatagtaggtatttactatctagattaggtctatttttacttcttcttcttatttttagtatataaattacttatttctttcttaagaagtatagtagattatatagttatttaataggcttttaaaacctagttaattactaaatttagtaagcttagagggctttttaatcttatctaaagtaatactttaatagataaagcctacttttatataaagactataaaactattaagtattaaaagttaatatcttcctattatatataaaaaaatcgatagtataaagagtttctaaagttaataaagcttaattttattagatatctaattatttagattaactttgaattattaattactaaaaaggctattaaactaagatttaataaagactttacctttaaaaataatatatagagaaaggacctaccctattatatttatatatttaatagtagttatctactattaaataatagtttttttaaataagattaaactatttactaattacttttaagtctttatattttatatacttataattataatatcttaagaattaagataagaggttagggtactatttaataaagttataaacctatttcttactaactaaaataactaggatagttttatattattaaagaagaatattagctatttcttatataaaagaatattagggggatattttatataaatctatagaaagtatctatttctaaagagattcctctttaattatagttaatttagaagaattagtatataaagttatatattattaaatactatataagtatatatagagtatagatttaggtatattaaagatatatactatcctataaatagatatagtcttttctttcttaaaagcctagatagctaataagatcctatcctcctactctattaattttataggtaattaggggtattttagtggtatagtaggcagttaaattaactaagtactaatttatagacgcgttttagttagggtatatagctcggttatatatatagcttacttaccgaatatattagtttattctttattattaattttaatactaactttataaataaaagtaagttttaacttatacttaatattattaagtcctaatactactaatactataaatattaaggtaattagttttttaattataaattccctttagtctctttatagatatttatatagtaacctagctttctatacttaaagtagttattatagaggatactattaggatttattttttatttattatatttatatttattattagatttattatcctacttatccttacctttacttttaaacctatctttatatttctttatctttaatataaataaagtataagagttaagactaatatctaggcttagatctaatttagtagtattatttttactattactaatacttttctctttctatatataaagtaatttctattagttagagatttaactttctattataaaaagatatctaatatatattttatatatttctaactctatatactattttaataacttagtataaactatattaattactttagcctaaaggtattctttctaatactattaattatataggtactttagatagtaatagatagtattaaactatattataaatatctatatagattaatattatttctattataaaatactatattctaatatattatttttatagatattttaaggattatttataagatatagatagaagtcctagaagttttattaaatagtaaattctttaaatatctttatataagactactaattatttaattatagtctttaccttatataaactaaaattatactattactaatatttattaaaatataattaaaattagttaataaaggtatagtattattaagttatatttctataaaatagtttaatatttatagattctcttaatatataaatataatatcttttaataacctatagtataatatagttatttatatttattaaaataagagactttatttactttaagatttctaattctataaagaggttttagtattccttccttatcttagtttctttaatatatttcctaagttaattaagggttaataagaaaagatttataagatattatactaatattaggtctaatagtatagtagtttcctatattaattctaaggtatctataaaaagatagtttataatagaaagaaggatttaattaattaaagcctatttattaggctataatattatagggagtccctataactatatattataagggtttaatataatataaactaatataaataaagggtagtctctattaggtaatctaagtatttaaaagctattagaactataagacccctaggtatacaatacctaagggaatactatgtataggtttatatatattcctctcttatacagacctttatctattatacctaatacttgactacctagctatttacctatttaaatactaggcatttgaccccttaagagtatattataaagtattgtgcctagttctaccatactctaataatatatgataataaagatattccttcccgagcctatataggtttatatatatttccctcttgtatagactttatctgttacagccccctcgagactggtaagaattggtcttagtatattatcaatatatcatgttccctctataaagccctttatgtattacctagttaggtcttatacctataaagtttatactagtgtgaaaatgagtgagacagaacttttgaaacttctagttaataccttatccctgctcttccatttcccttattttatataagcataaatcatggcaagtgacaaccagtggttccatagctcagttggttagagcgctgtgctaataacgcagatgtcgagggttcgaccccctctgggaccattcttttttgttttttgtttttcgataaatcttatcagaatgtgatagttatggctcatttaagccttaaacaggaacattggtttttgttatagtctagtggaaaatatgctgcacgattttccgtcaaatcctcttctatcagtatccatcaatcgtctttggactttgatcgatcttcccatcttctatcagcttcacctctcactttttcaaattcaacccaatggccaagcattacacgatagctcgaagctctctgttctgtactagacgtgcagcaatcaaaagcaagccacctagtagcaaggatacccctgaaaatattgacagggaaaggtacccgtacttctcgagcagagcaccactgatgggcacatttgccatagcgctgcagttccagtcagcatactacattatcatttcaagatatgggggtcatacgatagagctgtggcacccgacacagtcccaattgccaagccaagagtggtagaagtagcaacctgggcggcacaagcttgctggagggataaaatgccctacaaatctagtcagcattcgaagtttataccattcgaggataactcactccagacgcaaagccataggcagcggaccaaattaccagaccggccacagatgtgactttagtccagcacaatgcaacaacccctgcggatatagttgctatgatgcaacagttgaattttccgtacttgtcggcaacgatgccagggaggactcgaccgaagaatgaagccccattcacaatggaaacagtatagaatgccagagatgtcgagaatcctttctcaaccgcgtaggaagtcgtgtagaaaaacggcgagaacatgccaaagtatgtaatgaacatggcgaggcacagtagctgcagcgacggttttcgaaaaagggccatcgcttctgccttgtgactctgcggcttatccttttgctccgcggtatcttcgtcacttttctggtttgaatcacgactctccaaattgattgcaggcgtattcggagatttggcgactgcacaagagaagataaagcaaggaatcatgataaatccgacgattcgcatggtccagggaaacccaatcttgggcttattgatcagtctgtcgattgcaacgggccagataactccgccgagcgatgaacccgcaagcacaatccccatcgcggcagcacgcttcacttttatatattgtccgaccagtgcgagcatcggccatgtcaccatagccatggagacacctaacagaataccctgagcgaggaggaattgatagaactcctggcatagtgaagtcatcataattgcaaaaacacacccgaatgaaccaacatataccatgaactgttcaaaggaagtatgagttttatttctcgacgattcaggaagagtatgcttaccgttggtccaaagatatcaagcattgctcccgccacgacagatatagcaaacaaaaagaatattgacacagctccgatccatgcgatggtagatgtcgaggttgaggatagctggttttttgtgtagtactcttggaagataccgaacgagttcataaaccccacggtgcaaaaggtacaagtgaaggcgcctaatataactagccatgctcggggcctagaagaggttagtgcactggtcggctacatatcttgtagcttgaagtatatttcacttacgtgtattcagttggaggactatcctttggtgacattttggcagaaatgaaatggctctagttaaaagcaagatgactacggaataccatgacctttataagaaatctgactccttaattacatctgaaaatcactctcggagtctccgggctactgtctagatgccccggaggaagaattgacagatatggtttagcgtctcggagaatccgcggagtctccgggccaacacttcaagctgtctcctatgcgaaaaacgcgctgtttctttgctttcgctgggtcactattattaaactgttttcggggagattgaaaacatgaaacgaagacaagtttctggagtcgtcaccccaggcccgaaaagacagtctcgacaagaccccgtttcctgcgagtcctgtcgaaagaagaagctgaagtgcgacagagagcttccctgtagtagctgttcttcgcgtaaactggagtgcagctatggcagctacgcctcgggggcaacccctgtgcgacnnnnnnnnnnnnnnnnnnnnnnnnnnnnnnnnnnnnnnnnnnnnnnnnnnnnnnnnnnnnnnnnnnnnnnnnnnnnnnnnnnnnnnnnnnnnnnnnnnnnnnnnnnnnnnnnnnnnnnnnnnnnnnnnnnnnnnnnnnnnnnnnnnnnnnnnnnnnnnnnnnnnnnnnnnnnnnnnnnnnnnnnnnnnnnnnnnnnnnnnnnnnnnnnnnnnnnnnnnnnnnnnnnnnnnnnnnnnnnnnnnnnnnnnnnnnnnnnnnnnnnnnnnnnnnnnnnnnnnnnnnnnnnnnnnnnnnnnnnnnnnnnnnnnnnnnnnnnnnnnnnnnnnnnnnnnnnnnnnnnnnnnnnnnnnnnnnnnnnnnnnnnnnnnnnnnnnnnnnnnnnnnnnnnnnnnnnnnnnnnnnnnnnnnnnnnnnnnnnnnnnnnnnnnnnnnnnnnnnnnnnnnnnnnnnnnnnnnnnnnnnnnnnnnnnnnnnnnnnnnnnnnnnnnnnnnnnnnnnnnnnnnnnnnnnnnnnnnnnnnnnnnnnnnnnnnnnnnnnnnnnnnnnnnnnnnnnnnnnnnnnnnnnnnnnnnnnnnnnnnnnnnnnnnnnnnnnnnnnnnnnnnnnnnnnnnnnnnnnnnnnnnnnnnnnnnnnnnnnnnnnnnnnnnnnnnnnnnnnnnnnnnnnnnnnnnnnnnnnnnnnnnnnnnnnnnnnnnnnnnnnnnnnnnnnnnnnnnnnnnnnnnnnnnnnnnnnnnnnnnnnnnnnnnnnnnnnnnnnnnnnnnnnnnnnnnnnnnnnnnnnnnnnnnnnnnnnnnnnnnnnnnnnnnnnnnnnnnnnnnnnnnnnnnnnnnnnnnnnnnnnnnnnnnnnnnnnnnnnnnnnnnnnnnnnnnnnnnnnnnnnnnnnnnnnnnnnnnnnnnnnnnnnnnnnnnnnnnnnnnnnnnnnnnnnnnnnnnnnnnnnnnnnnnnnnnnnnnnnnnnnnnnnnnnnnnnnnnnnnnnnnnnnnnnnnnnnnnnnnnnnnnnnnnnnnnnnnnnnnnnnnnnnnnnnnnnnnnnnnnnnnnnnnnnnnnnnnnnnnnnnnnnnnnnnnnnnnnnnnnnnnnnnnnnnnnnnnnnnnnnnnnnnnnnnnnnnnnnnnnnnnnnnnnnnnnnnnnnnnnnnnnnnnnnnnnnnnnnnnnnnnnnnnnnnnnnnnnnnnnnnnnnnnnnnnnnnnnnnnnnnnnnnnnnnnnnnnnnnnnnnnnnnnnnnnnnnnnnnnnnnnnnnnnnnnnnnnnnnnnnnnnnnnnnnnnnnnnnnnnnnnnnnnnnnnnnnnnnnnnnnnnnnnnnnnnnnnnnnnnnnnnnnnnnnnnnnnnnnnnnnnnnnnnnnnnnnnnnnnnnnnnnnnnnnnnnnnnnnnnnnnnnnnnnnnnnnnnnnnnnnnnnnnnnnnnnnnnnnnnnnnnnnnnnnnnnnnnnnnnnnnnnnnnnnnnnnnnnnnnnnnnnnnnnnnnnnnnnnnnnnnnnnnnnnnnnnnnnnnnnnnnnnnnnnnnnnnnnnnnnnnnnnnnnnnnnnnnnnnnnnnnnnnnnnnnnnnnnnnnnnnnnnnnnnnnnnnnnnnnnnnnnnnnnnnnnnnnnnnnnnnnnnnnnnnnnnnnnnnnnnnnnnnnnnnnnnnnnnnnnnnnnnnnnnnnnnnnnnnnnnnnnnnnnnnnnnnnnnnnnnnnnnnnnnnnnnnnnnnnnnnnnnnnnnnnnnnnnnnnnnnnnnnnnnnnnnnnnnnnnnnnnnnnnnnnnnnnnnnnnnnnnnnnnnnnnnnnnnnnnnnnnnnnnnnnnnnnnnnnnnnnnnnnnnnnnnnnnnnnnnnnnnnnnnnnnnnnnnnnnnnnnnnnnnnnnnnnnnnnnnnnnnnnnnnnnnnnnnnnnnnnnnnnnnnnnnnnnnnnnnnnnnnnnnnnnnnnnnnnnnnnnnnnnnnnnnnnnnnnnnnnnnnnnnnnnnnnnnnnnnnnnnnnnnnnnnnnnnnnnnnnnnnnnnnnnnnnnnnnnnnnnnnnnnnnnnnnnnnnnnnnnnnnnnnnnnnnnnnnnnnnnnnnnnnnnnnnnnnnnnnnnnnnnnnnnnnnnnnnnnnnnnnnnnnnnnnnnnnnnnnnnnnnnnnnnnnnnnnnnnnnnnnnnnnnnnnnnnnnnnnnnnnnnnnnnnnnnnnnnnnnnnnnnnnnnnnnnnnnnnnnnnnnnnnnnnnnnnnnnnnnnnnnnnnnnnnnnnnnnnnnnnnnnnnnnnnnnnnnnnnnnnnnnnnnnnnnnnnnnnnnnnnnnnnnnnnnnnnnnnnnnnnnnnnnnnnnnnnnnnnnnnnnnnnnnnnnnnnnnnnnnnnnnnnnnnnnnnnnnnnnnnnnnnnnnnnnnnnnnnnnnnnnnnnnnnnnnnnnnnnnnnnnnnnnnnnnnnnnnnnnnnnnnnnnnnnnnnnnnnnnnnnnnnnnnnnnnnnnnnnnnnnnnnnnnnnnnnnnnnnnnnnnnnnnnnnnnnnnnnnnnnnnnnnnnnnnnnnnnnnnnnnnnnnnnnnnnnnnnnnnnnnnnnnnnnnnnnnnnnnnnnnnnnnnnnnnnnnnnnnnnnnnnnnnnnnnnnnnnnnnnnnnnnnnnnnnnnnnnnnnnnnnnnnnnnnnnnnnnnnnnnnnnnnnnnnnnnnnnnnnnnnnnnnnnnnnnnnnnnnnnnnnnnnnnnnnnnnnnnnnnnnnnnnnnnnnnnnnnnnnnnnnnnnnnnnnnnnnnnnnnnnnnnnnnnnnnnnnnnnnnnnnnnnnnnnnnnnnnnnnnnnnnnnnnnnnnnnnnnnnnnnnnnnnnnnnnnnnnnnnnnnnnnnnnnnnnnnnnnnnnnnnnnnnnnnnnnnnnnnnnnnnnnnnnnnnnnnnnnnnnnnnnnnnnnnnnnnnnnnnnnggttccatagctcagttggttagagcgctgtgctaataacgcagatgtcgagggttcgaccccctctgggaccattttttgctcctcttctatcagtatccgttcccgaccgcctttggactttgatcgatcttattcttcccatgttctatcagcctcatctcttactttcttaatgatgcaaagctcaaatggttaagctattgcagcttcaaaaaccatctgccttcctcttagtaatggtgcagacctctggtagatcctttgatatcgctttttgcggaggatatctattttgatctcgaagagaacgatcttccttcccggacgaatgaagaaactgaagagcagctggagcttcgaaataagattgttagatatctcaagagcaacatgtgggggaaacataatggatatatccagttcggtgataattacgagtacgatgtcttccctattgttctatactagtatctaaacgatagatcccttcgtgagagaaagaatactatccataatactattaacagtatttttccagctatttgagagacactcccctcggccgactgcctatactattgagtgacatttggagtattaccctccatctactcctgtacttatcagacgagattatttgtgtgagccgaacttgttctatggagaacgaagtgtaagtaatagacgaaccccgaaccccatcctcttcaaagtatatatattaattaaagttgtcttattgacatagctcgatggcatttattctggtgaagaccatgttgatcgttattacaaaccacaagtatagggttagcagcaagaggaagatcagtggagatatcatataagaggaagtttctagaaaatactcctcattccttcggatggaagtaggctgcaatgactgcgaagacgattaccatgacgatagaaaaaagctacctgctaaaaaaaaagccagaaaccgagaagtaactagaagagaagctctcggtaaggtatcttggttgtgtctgaaggagtaaagaatgcgactactgtgctgtgttataacctgccttataaaagagccttttaagatactccaggagatacctactaagaagatacttaccagtattctcgagaggataaaataagattttcatgagcgatatgaatccttccttgacagctataaagtgagtacattcggtagaggaaatactataagccgcccttataccaaacacaatctcaactttaacaatcttgagatccggttctgttgggatcgatgagtaagtccaatgctagtatccataagctatggcctaacatctcttagattacgggcaataggtaggtaccccgaggaagaggataacccaggagtctaccttcatatcttataaacctaacagagaaagttttggttgtatattagccaatctattaagctaatagaccggatttacaagcactgtgataaggtatactgtaggctaaatccatcactttattacagcgtgtgggattccagctcttatgcttcggacgccttaaagcttaaccaatggccgagcggatagcttttctctatgttaggtgataaattttcgttttccctattgcaaaatccttgcagctttcctggcaggtcgaagattaagttttttttttttaaccattgctttcgaagacccccaggtctttcctttagcgcgtcaggtgtgtagtatatatcctgctagtaggttagttattgccgtggaagctgtcaaaaagggtggagatgattgggtctggccttttactcatggaaagagggcatttctcagtatgaacagcctttgacgaatttcaaacacctatgctaaatccgaaaaaaaagaaaacgatgtaaatataaccccagttagttataggggaaacctatatagatgctaccccccttggtctatccttggccggatctgtctactctatagcccgatgcgacacaacccgttggtccgctagcacaatggcagtaatggatgatgtaggattctacctgaatatatagataagaacaatattccgaaagctttaagtaccttattccagggatccagggaggtatatatcagcacaaagtctaagtttgatgggggtagtccattcgcaaacggtcagaacccaaagaaccaatcagataaaagaatatgaatcctagctaatgagactactccaaacagactgtaaaatctgcagaacccgagttgatggattattttatttgagatagctgaatgttctgcatctgtacgtagatggtgcttgaggccgtagtggtgatataaatctcacccccgcacgctatctctctctagcttattgtctatttcgattcgcacaatcatgcagcactggctgaattatgtaaaagttgcctgttgtgctatgtaatcggttccatagctcagttggttagagcgctgtgctaataacgcagatgtcgagggttcgaccccctctgggaccattttttttttcggacagaaaatcgcgataatgcgaatgtattggtcgatttcttacagcagaaatatctctacatggtccgaaatgtataatctggtacggaggtccatttcaaaagttctgtctcaaccttttcttggcttttttaaataatacactagcgtgtaatggcatatagctactacagcgggacctctgatatattagaccagccaaggtacctaaatagaccgccttcctaccaaatattctgctgacgagttttgaactagtagaactggcagaattaagaggaagttttttttaggtacatttcttaagccgaatatttcggaggtcctaccatatatactataacgaggggttcgatatcaagaactagggctaaggcctaagagaaagtatgggatgaattgccttagatgtatattccggcttagattgtaatgatacccttctatattaagagttgctttagaaggtgtaaggtagttggtttgttcaactatataatgtatgttgtatttaatcaaattagaacgagataacagcaatttaaaacagccttactatattaggactaagttcatactagcgtgaaaatgaatgagacagaacttttgaaatggacctccgtacagagtacagagtagttaaccagttaacttcgttaggacacaattaataagcaaatgcacagataaaagtcacacgggcggtctgtaaaatgacctgtatagaaatagtatcgatgttggtttctgacattctgaaaattgtgttttagtgcctctgcacccacctcctcaatgatgtaaaaaatgctggctgtattctataatcggttccatagctcagttggttagagcgctgtgctaataacgcagatgtcgagggttcgaccccctctgggaccattcttttttgttttttgtttttcgataaatcttatcagaatgtgatagttatggctcatttaagccttaaacaggaacattggtttttgttatagtctagtggaaaatatgctgcacgattttccgtcaaatcctcttctatcagtatccatcaatcgtctttggactttgatcgatcttcccatcttctatcagcttcacctctcactttttcaaattcaacccaatggccaagcattacacgatagctcgaagctctctgttctgtactagacgtgcagcaatcaaaagcaagccacctagtagcaaggatacccctgaaaatattgacagggaaaggtcatgttttttttccccgatctactgcaaaatgaaccagcacgctgttgaataaacaaaattgaaaagatcaaaagctgagaaattcggttccgaatgaaagtgtaagcggcgcgtagactggtgttctgcttattcgaaaggaaacgatctcgttgagtcttgttgtggttgttgtatagacgacgaagttgatcaagatttgtaggggagcgtgtacattggaattataacggtatcgagttgtggaagaactatgacctaaacttggctggcgatattaaaagaagttgtcgtagtaaaaaccgagctgttgaatttcgaaggctggtcttgcacgaatggcctactttgctgactggctgaccggtacatttctctagatctggaagaaaacctcggaacagtttggcggggtagaagaagaaaaagaaggaggtatagcctgctagagctgctgaatcttgctatacgattattaatcgtggcgggcaagaagctctaaaagctattatattaactagctgtctcccactttgcaacttgcttcttcttcctctccccattttagttattctgaattcaatgcactcttcgtttgaaagacctggcatgtcacactttatacacctttttgttttcgtctgctttgcgttctaagatggatctatctctgtactgccaaaacaaccttctttatacataggagtcattatcaagataccaacgtggaggatagtatccaatcaaccttgaaaatacatttaaagatgaccgttacaagatatatcacaagttagaatggggtggcttttccacggtatagcttacgaaagacagagagtcagtttaccccatacctcatttctagctaatcttatactagccgaaatcaatgggtctccttgaaaatcattaccgtagattcgtcgctactagagctggaacatttggtaaatgtaatggcaaaatttcgaggggagctttcttcaaactatattgttcagctacttgatgccttcgtctacgaaggccctaatgggttataccaatgtcttatatttagcttaattggtcctatagtttatcagatcgtcgcggaacactacaataataacgaaaaactcgagctggaaactacgccctaaatttcgaagtagcttttgaaagctattaaatatattcatagtactattatgtatcatgaaggtcagggtacttcctcctctatagttattttctatagttagctccattttacttacgacttgttagatattagcgatcagaatactatattcagttatactaatttatctaaagagactaaggagcagctttcgatattcttagatccctaaaagttgagccgctaaaacggattgatagtatacctctaagcaataatttgcgggcccaaatagtcgagacagcagactagattagataggtagataaggattagaaaaacattcggatcctcgatttcggagagtttctatcaaggatataaacccctaaagctggcctagctgtgttcattaagggtaccagagacattcttaccgattactttgactattacatcgatttatggcatataggttatatagtatctcaatatatcatttatttaaagaaaatatactcacagcgatactaactatagatttattaattcttattcacaacctggtcattctggtattcccgaattagtttcggagacgacttattaattggtcaaatgattgggtttatagagaagttaccagctgaatagaagcctgagtaggaatcgattaggaagatacctaacgataataagccgaaagaaggtaattgaactgatccatatacagaagtactactaattttgctcgaagattatggaacctcgaagcttgaacagatgtttgctagtttagcacctggtctaacactcaaacctctacttcgtgtgatgcaaggattaacgcgattcttaccgtctactcgccttactgcagaagaggcacttgatttgctaggtgacgcccaagattaatagataaattaagcaaatagatcacacccctttattggaacattatttatttgacataaatgttaacgtagcagattgaagaatagagtaacacgttcataatcaacatctgacccaggggggcctgactttgggacccctctggccggcgcagcaatagcttccaagtcgacctttgtcatgccagggtgcagatggatatcatacgaaagtgtagttccatcgccagatggatgaagacgctgcatacccacgagtgtaacaatttttacttgtcgttgggaagtactagccgccaaatgaagcctgaccgtcagtatactatgcgacggaggaagatggaccgtgatattctgttgagaaacaagcgacgaaggcggtatatctagacagaagtccggttgtaacgacaaagaggcatgtgtaagaacccgaacgttacgaatcaaagccatccttgggtctggctcatagttagctggaagtcctgcaaatcccagtgggagtcaaaccttggcctgatcgcctcagaagcgaatccatgggcgatgaatcaaaatgcggcttgtagggagcacgtgctaacaacgggtcaacaaaggccgggagctgagcaacacttcgccaggcgatagaatgcctcccaagcgtaacatacctgaagcggaagatgaatgccgagtgacattcgaagaggcatcaacagatgcatttgggggattttgcgaagtgaacatcgtcagggcggttgcgttggtcatcgagctcagtaaaccttgcgtgctcatagaactgttctgttgttcctctgagccagatggtgtgtttgtagtgctcgacctagggctgtcaagttgccccccaagagaccatcctcggggagttctactacctgctaatccagctccgggaatatcctgcgtatggccttgggattcgtccttaaatgtgacatctgaagattgcccatcgtttttggatagtgtatcggagctctgcccaggcagtttcaaggttaacctctgcgccattaggggcacagcagtgcccacttttaatctgatgcgagacatctcaggggttccatctacctcacggggattcggaacaagctttttggcttcggcaacgcgtcggtggaagtgattctgggctccaatgttagcctgccgaaggggacggatggtaagagcgtcgcggtatcgtctcacctccaaaacccctgcgagaatagagatatcgctgtcgtcttcattgtattccctagcatttcgccatacatagctgacctcttcttcaaaggactgccacgtaggatatgcggtggttctggatgaattcttcctactgtctgtaccgcgaactctcttttggatgcttcgtaaggacacgggatgttgaataatctcatagtaatcccggtacagattccggtctggtttcccaatgaacgggtaagaaacctcctggccactaattcggggcatcagcttcaagtaaaggaccaaaatcagtgatacctactcagaatccttgagccgggtcaactcggacataatcttgtcctgtgcagcctgaagactgtcaccttcaaaatctccctcggattcgtcctgcgactccggggttcgatctgcttcctctggtggctctaaatccagatgcgacgacgcaagattggactcatcgggaatcatgagatcatcatcctatcacacgcaccgcaacttgaattagcgattgaaacatgtggcccgatttataggcgcaaagcaacgatatagcatagtgaatagagtcgaactgccggagttgtaatgtcgcgattgccctccactcgagtgtcaagggctaatcgatatgtattaatgtaacaaattggatacttacggaaacctttcggcgtttcgttctacgaaacttcatatttggggaagctgcggcagcccgtcgctttgaggtcatgtcttagtcctgataatgtcccgagtcgcgagtcgagtcacacattgaagatagcaatatgtgactgaagaccacaggagaagtggagatacagatttaataaataaagggtcaaaattgattgaacaaattacaagtagtgatagagtatggcaaaagggagatatttagacattcctcatcttagacgtgttgcagacgcgtctacggccccggggtcatcccgccttatgtaagactggtgggccacgagatatcatagtacagaatggtatcatacagtactgtaattaaatttgtatacaaacaactgcaaatctgatgtaccggcttttgcaacggtgtaattttggtaccagctacatacatagtgcatgtgactattttgagtatgatcatgtgaccaaaattggatcgacacctgaggcatcaatagtttctctcccccactattttcccgagtcccgcaaaaacaagtccggtgcttgttgttttgacaactcacatccactcctttctctgtcgcgtcacttttattctcacccgatcattcatcctccgtacctttgattccttaatatcagatcatcttgcacaaccttagggtccctacaagagcactgcgagcgtacgtttttagttgtcgctacatgcgataatcattcagccacattgtgagccgcatcctcaagctatttatttactggccttcttgttggaacaaatcgaattgacgttgacaatctatacagttgagagatccttatactgccatctcttctcatttcactatccaaatggacatcgacccagctaggcgcaacaagaagccccgtctcctcctggagacggagcgcgagaagcttgatgaatttgtggactctattcactactcggcaaggtgaggactctatggcaatgcggtagaccctccattgactctgtatagatacaacgacgacaaatttgaataccgccatgtgcagctcccaaagaatatgctcaaaaagatccccgcagactactttgacagttccaagggcactctgaaattgctttgggaggaggaatggcgagctctgggtattacacaagtatgttgaacataactgaaagatgtgcaggggttctaataatgtgtgcgcagagcttgggatgggagcattacgaggtgcatgaacctgaacctcatatcttattgttcaagtcggttatttgcgaactgttcccttagatgtatcactaaccgtcttgtaggcgccctcttaactaccaaccccctctgcaacaataagtttggcgttatgcttggaaatatgagcagttgagaagacatcgctttatgttcgtgcatggcaggcacatgggttcgcaatattgcctattagcgtccacaaaagcttcatatttgaagttctggaatgacaccaagttccattttctccttgcccgccatttcattgacacgctaaaccaggctatctctcagtctctctattatgtcatacgaaagaccaacatctgtcttgtcatagacacctggactgttctagcatgaccattaaatcgcgtttttggccagtcattctccctactaggctgtgatgaggctgctacggatgatgagcttctccacttcctgaacttgatgtgagaatctagagatatgatctcagtcaagttatcctagattgaagaatgctgtgggagagacatggacctcctctgcttggtatttctagtcgacgctagagggggaaaaaaacagaccgagtatttgcaaagggagcggatatacctggactacccattgatgtcgttggtcatttgttttccagctttaattgagtatttcgctaatggttagcaaatcaagtaacatcaagtaacttcttctctcatctatttccacgctgcctgccactttcgcccgttcgtcgcatgacgtctttgttgcgcatctaatttgtcacgctgaggggacatggcttattgccctagattgtgactggaataaggatcggttgcgctgatcaagtcagcacatggtatagggactatagtggctcggtactaatatagctagatacatatgtatatcgtaaatagctctttggaaacgtcatttcaacccaaggttggtcgactcctagtacattagacataggaagacacagatacagtattaataattcttatagccatccatggctgcttatgcataaatatagaagtagtcgcaaatttgtggtaattctttaagtcactatggaaaacacgtatgtacatcgtattcatacatagggcaaaatgctccacgcacatttcatgaacatcaagggagaccgatattgaggtgaaagttctgggtatataggatcaacttcccaatgcctcctgtctcctcatattcagatccttgagcgtcatttccactgttcgccatccacgcttggctggatcatactcgcctttcacctcgtatcgacaaaacccattaggacccttcaacccaactggacccgtgataaagaaggctccgcggtgagcagaccgtgatgcctgggcctcttcatggtgtaatcgtaatttgaatgcctctgatgccaagtgcaaatccgaccccgggccgaggtctggtaacggtagccgctgtaataaagatatgagtgaggatgggtggtagttagaattctcggtattaggcggcatattttctttgagtccgtcagtcaggggaggttgtagcttagattgatctttctggccaatccagttccttctctcatcggtaggcgcggcagaagaatcatccaacaaatcaacggcatctagcgacttccctgcgggtttcctgaaacgatcaagttgtctcagcaagagcaccagatatgcatctctaattgctaaagcaatatgaactggtttcatgaatgtctgtaacctgtcacctatctcggggtccatcggctttgcgacccacgatatactgtcgttcttgatctccaccctgtctgccgtcagtataagagccaagcttttagagattagcagtacataccccgagcgcacatatccaggaggggcacggtctggaaattgatggacaagccagaatcccgtgagggagagaggctcgccgagtatcggtgacatatgcctccccgcgttatccaaaacgattgtggcgagttcatctaaactcgtaagcgaatgatcttcaacgggttttgaatcgaatccttacccctaagcttctggagcttcttccgatccttagaaaatttcacaaactcttgccactctggatccgatgtagtgtatagctcgccttgctgcaaacgtgaccaggcaagcggaatgaataacgctccctcgttttcgacctctttcccggtgatttcgccgcttccaacggaggtttgacgcggagatgtcttctccgggttggccataggagatagatcagcatcttcggtatcgtcgtcaaatcgtatcagtacgaaggtgctccagaggtagaatgcggtgccgtacaggagacattttgatatgaacgacctgagagattctacgttagtctggctaaagagatcttgatttggcttgaaatgggcatcttacctaatccgaggccgcctaaacctcacatgtcgcacattttgtgggtttaagaagttggaatgagcgtgtgtaggaccgaagagagacgagcgtgcgtgaggacttcgaagcagatacctgagccggagcattgggaaaagccaatccctacaatgattctcactagagtatcatctcaatatgaaaaaataaggaatagatagaatccttgaagcctgatatgcacgaggatttgtgttgcgggtttgctaataatggcaaagggttcggcggtttggtggattatgtaacgtgcggcgttgcggcgtcagggagcctaccatagacgtacactacaatatatgtgtgtagataggtgatgatctctcagaatgaatagtattactaccagaataaactgtaagcttaaaatctatgacatggaccgtagcatatatcgataattggttgagcactcaatatacatactagaccacgtgatagcttagtgatatcttatcggatgccccaaagtcgtccgtagccaaatggtattctgtcctcgactccgtttgtatccaacaaaacgctagataccctcagaggagaatcttggtttgggaatcgccacatttgccaaaatagtcttgtcttacctccggccctcccgattctagcaatatgcgctgggtgtccgccttccttgccctggcattaacaggtgcactgcaaacaaatgcactggatgctacaatcttcacgtttcctcccaagactgcaacctcttcaactgctaatctccaacaacaaacaatatcagaagatgaggctcagcttgtcttagagcttcgcatgaagtcctctatagcatcggtcctcggaatggtggatgcagacaccgtgaaccgcttgaatcatttcacccaggatgatctcactctctttgggggagctactggggggatttctcttgagaaaagcttctttgttctggaagggatcgaccaggaagttggtaagtggaagcggactcacacttgacttaaaaactttagctaagatactctacagccctagccatgcaaaaagcccagcccaaccatcttcatattcctcagatttcctcaccctttatcgaatttgatctcctggaatcatttatcgaaagcagcctcactgcgaaaggggaccgtgggcaaatctgtacatactacaacgatgctaacagggctgcgtcatcgacatcccaggtagcaaagtcaactttaataatcttggggttccctcgctaatctttcaattataccagactcctaaggaatgcctatccagggaccctatttttgctgatgagtctgatatgcttgtccatgacttccttacactagttgattcagtggaatcctggataagcaaggatcacagttattcagctttgaagttgtcctttaaggtatcgagtttcccctgcctaattagtgaatgatttctgattccacgtcaccaattgcagaatgcctctggtgattctcttctcagaaccaagctcctagagacattgctccttcacttagctagaataccgtcgaccagcaaccaggaaatcacgatattggttctacccgctggtgttgaatcagaaggacttaaccgccgaggcgcgaagcaatcatcggcaccagtcacccatcccttcagaaggtcggcaccgctgcagtcaaccctagcgcctgtctgtcatgcttcgaactcttcgtgtgccgaatcaaccaatgactgttccggacacggttcctgctatctgaaatacggctcgggtgttgagggaactacaggcaattgttatgcatgccaatgcagacaaagtgttgttcagaatagcgatggtaccaccaagacagttcaatggggtggatcggcttgccagaaaagagacattagctcacctttcttcctcgttgcaggcgtcagtctgcttgccatcgttctagttgggagtgcgattgggatgcttttcagtatgggctcacaggagctacccagtgtcatcagcgctggtgtaggaggccctaagtctcagatgtgagcataggggaagctgtgtaggtgttagggtgtgtttttcctcttttctttttttcttggccgagggcttcatgttctttacctcattcatccctcaacctttaagcaaaaaattttgctttactttgtttctaattgccccttccctaccctgcgtctgagggaaactttcggtcaatacagcagtacatatatgtaaggtggcacaatctatttataaggggcacgcggctatagcaaaagaatatattgtatagcatgtacaaaatagtactctctgtatgtattcgagtaatgcgcaccaagagatatatagatatgcataacccattcagcctgctaaatggactaagaatcggggggaagcagtggctgccagtagcgccgtaggacaagagggagacaagacaattcgtgaatcatcagccgcaagaataaaaggtccccatgatccagacgcgccctagtccagttgcgcaaagatcgataaattacacatatcaagtcataaacaaggaaaatataactccagcccacattccagatgtggttccggcatgaaaatgagttgcagattagtcaaatcgcgaagagttatgagaaggatagcactcaaagaccaatcatgtggtaccagcttcgacttgacgaggtgtgcgtctttccgaaggcagtggatccacagaagccccaactagaggtggtcttcttgaggagggaaaatggaaggaaagttggcgtagtcgagtaggaatcaatcgagaccaggtggattgacccgatgaacccgaggcatggggtgggtcccaaggctgatcacgcctactctgtacatgctgttctcggtttggagatacgcttctttcctctggagatgtcgattggaatattcggctaggcaagcccatctggcctctgaatccgcttgccctgccaccattccaagcaactcgagggggtctgaggattgcatccgggtggttcgaggctgtacgacgaccctgacgatctgtgacagactgtgcttcggtctgtgcacggggtttggggacatagtaatcggccttgcatagagggcaacatgcccttctgctagtaagccaggggtcgacgcatgaagcatggaaagcatggccacaagtaagtccccggatatcatcatcgtcctcaatgatatctaggcaaatcgcacaagaatcgccagggttgggcagaagatcagcagtaacagcattaccaatgtaggcaccttcatcatgttccccaatatccgtggtcatgttttcattggtcaaggaatgctgccatttctctttctgtatacctgcaccagtggactgccggttggaaggctttgaagatactgcagggcccttctccgaagtctgcaccagagggccatcttgtacctcttgaatggggggtggtaaggtatcaacggaatccacccgtacatggcccttggtagacggtgatattgcagccgtgtgaaccccaaccgcctttgtcacgatatcactttcatcctttaggctctgtggcctgctatttggggctgtgatacctccttctgttgaaaggccctggttggcgcgagatgatctccacactttgtacttgacaagtgggaaccgcccgttgacttcatccatcgtcattagccttttttcccttcgcctgcgatgagttcgtggcatggtgaccaagtctatgggctctcctacttcttcactgcggagttgacgatttcgttggttatatcgaaagcagtatttgactccaacaatgatcctgcgatgaccgtcagatgccatccctgaaacactgggaggctggcctgttggcctgggcagggggtatatgaagcaacgtaccatagatttgtaaacacaacaccaaacccaagagcgacgaagaacaataaaggtgagcttgtagcattattcgaactcgaaccctctccgtcgctactagcagtggtggtggtggcagcagcactactagaggctgatgttggcgttgaagacattccaaccgaaattcgatacgaaaaggatctcactcggaacgttggcgctcggattattgttggagtctcagttgcccaaagttcgatccttcatgccttgagttgtgtgtacagggcaaccctgtatgtaagtttgggtaagactccagcagattaagtccaaggcgacgagaacgtggacgggaatgatccaggttatgtaccctatgtgatagactggatatttggagattaaacctgatggtctgtcatggatgattgaccgtaagcagagcacacagaacttcctacgaagagaaggtgaatgccgagggtcggtgtcatatcattatcaatagcaagagcagaaggaacctggaggtaaagagaaagaagaggaagaggaagcgagatagagagataaagagatagatagagagaaagtggatcagggcaggacggaggccttttgatttctgggatgcatgcggatcgagactcgacacctgaggctgtgaatcacgggactgccttactgtaaggtacatccacatttgaaggggggatgagaccagggctatttacctgccccctttctttctttttctatttgaagatgatattattacatacctggctaccttcaagggtacatataagctcgtatgcatatgtacactactctatgaatcagtatagctatatgtaatgtagtatggatacagtacaatatatatgatatactactatacacacaatgtgtaatcaattcactactagttctttagattgaattatacggtaagagtggcttacattaatgtgttggttttgtgggaaagcccaattagccgaccacttacccctcgtaaagtgaaacaagaaagatgtcctatatagacatacatatataatataatgtagttatatgctggaaatatggtcaatatcaaagtttcacacggctgctacaccgctccgtacttcccgaaacctctagttcggagatctatgaactctccccttcatcacatctgcacaccccaagtctcattatggctgaacccaatccagtggttttctttgatattgcccttggaggtaagtcaatttagttattttcatgtcggctctagtgtgcggcatcggagtacatagtctggcatggcgaactctgctaagtaatataatccatacaggcgagtctctaggtcgagtgaaaatggagttgttcgccaatgtcactccacgaactgcggagaatttccgccaattctgcaccggcgagagcaaaaaccccaagggacagcctcagggctacaagggaagcaaatttcaccgagtggtatgtgatgaagatccttggatggcgatgcggaattaatgctcattgtagatcaaagacttcatgatccagggtggagatttcatcaatggcgatgggactgggtcatgtactatctatggcacctcgaaatttgccgatgaaaatttcactctcacacatgaccgtgccgggttattaagtatggctgtaagtctgaatctcgagaccgagggggatgtttaccccgaaaggatctttttactaataccagcagaattcgggcccagacaccaatggttgccaattctttataacaaccacagccacaccattcttgaacaacaagcatgtggtcttcggccaggtgattgatgggatagatatcgttaaaatgcttgaacacacccgtaccaccaaagacaagcccaaccaagacgtgacgattgtgcaatgtggagagatgtaataataattacaatagcaaacacgtcctacaaatccatagctcctagaattgcaggaaaataatttgaatcgtgggaaatatatcaatttcatatggctttagtaaccagggctcttctgatattccatagtgggcacagacgtgatataaaaaaaagtaacttcacagaatcccgtcctcaggtctagagcttgaatttattcagataatccgcagccagtgagatagcctcctcgaccttgtcagcgttggtaccgttaccaatggaggtaggtccttttcctcctgcttttcctccaacggcgccagagacgacggccgcccagtcacttgccgaagcaccttggtcactcagtgcctgtgtccgaattagtataagaatccatatgtagtaatattctaccatttgatttcccaaatgcaagaagggtagggctgatgtgttctcttactcacctgagagatgtaacatccgtgtgaaacccggccttgttcagagtcggccgccaatagataaacactcttaccctgcatcttggacttgacatggttgagagattcactgacagccttggcattggcagaaatcggaagctggaccacaagccacgacttgtcttggttttcaggagcctcgaaataggaggtgatagcgtcgacggctttcttcgattccagtttttgttgggccttttgatcatcgagaacttgcttattgatcttggcaaaccgttcgcggaacttggccttgcggacggcggagattgcaagctggttgagatccacctgaacttgcttagcctcctgctccttttcagagcccaaaggcaatgcatccagccgatcaaggcgctgtccgaattcctcggcaactctctgcacctcatgtgcatcctctccagtgacggcaataattcggcgaattcccttggcaatgccactctcctccaggatgatcaaatccttgatatcgcctgtcttctgcacatgtgttccaccgcagaactcaatgctgacttcctgccaacggggatctttgacattctgcaggatctcctccaattccacaccgacagagacaacacgaacaggatcagggtaagtctcgccgaatacggccctgacgccagaaatttgctgggcagtggcgagcggaagttcttgggagtagacagcacagttttgtcggatataatcagtcgccttggcttcgatcttctcaagctcggcgtcagagattgcgctcttgtgggagaagtcaaacctaagcttctcggcggccaccagggaacccttttgatcaacaccatcgcctaggatttccttcagagcgaaattcagtatatgggttccggtgtggttatttcggatgggccagcgtcggagctcatcatactcgcaaatgacagaattgccgacactgaatgatccgtatttcatgaagccggtgtgtaaaacgtatccggcgtaagactgtacatcgccaacttcaagctccgcttgtccgtcgatgattattttgccggtatcattttcctgaccaccctgttcggcatagaagttcgtacggtcgagaatgacgccaagctgtgccccctcaggaacatcgtcagtgctattgtggaaagttttcccgtggtaaatagccttaacgtgagaagtgatattaccccggccgaatttaggcgaatcatccgttttttgtacgtcgttcattttctccaggttgcctaggtcatggacatcaagcttaactgtgttatcagcagccttcttttgacccttactagcttcctttgccttcaagcgagcctcttcaaattcgacatcatcaatgcggagaccacgttcctcggccatgattcgagttaggtcaacagggaagccaaaggtatcgtacagtctccaaacatcagcgccatggagcatatcggtgcccttggctttagcatgttgggcatattgctcaaattggcgctcacctctatccaaggtcttggcaaatgacaactcttcctcgtctaagatttcgatgacatcttgctgcttgcgcttgagttcagggaacatttcacccaactgatccacaacagtcggcactagcttagcgaagaaattcccaatatcgacctggaaatatttccgcgcataccgagctcctcggcgtaggacacggcgaatcacatagccacggccctcattgttgggaatgactccatccgagatagcgaacatcaaagtccgcacgtggtctgcaataacacggtaggcggtgtcaattccatcggcatcgtcggcgccaaagtggccgcggtattccctggccccagtggcattctggatagcctggaatataggagtgaagacatcggtatcgtagttggaaggtttgtcctggagaattgataccagtcgctcgaagcccattccagtgtcaacatgtttgttgggaaggggtctcaaggagctatccggctcgcggttatattggatgaagacgttgttccagatttccagcacatttgggtcgtcttcgttgacgagatgagcagcgttgcgtccaccgatccgatcgtagtgcacttcactacaaggtccacatgggccctggtcacccatttcccagaagttgtctttcatgtctccaggaaggatgtgagattcaggaacgcccaccgatttccatatttctttggcttccagatccggttccaatccaccagcttcattgccctcaaaataagtaacgtagaggcgatcgggatctagcccatagacttccgtcaacagggtccacgaataagtgatagcttctttcttgaagtagtcgccaaaactccagttgccgagcatctcaaagaaggtctagagactttgtcagcacttcttctggtgaatgatagaaagcgagtttctatactgacatggtgatagctatctttgccaacatcatccagatcctgtgtcaggttagtcagtgtaccataagaccctcttaaagtttatcaaggcacacccacgttatgttttccaccggcacggagacactatccagttgtatcagcaacagtcccaagtcggatgtactggtgagtgtgaattatccaataccttttgcgagttcgttgcgcgtttcatctttccaaagtctgatgaggcgtcaacggtgcccaggaagatggacttgaactggttcattcccgcattggtgaaaagaagagtcggatctgacagaggagcgacgggggaagaagggactgtatacaagaataacttcaggtcagtccatgtcgttggcgggggtggaggggtaggcaaaaaaagaagaagaatgggctcaacgcaccgaatgtatggccattttgtttaaaataatctagaaaggtgtctcggactcgttgagcagtccattctggaccgagagaagtcatcctgtcgaatgtgggatgcttggttgacagggagtgaacaaggcaaggaaagaatgttctgggttgatttctgcgaaagagatgagtcaaagcccgttccccgttcgtcaccaccccagaaacccgcatcgagcaacgaaatgcacttgaccccagatctgtgcacttagaagttcaaacgcttttctttccttttcttcttctttaattattaaccccacacttccaaacactcgcaagagaaggagagagagatagaaagtgtggatggcgggtgaggaaaatcacgggaagaagcgcccggccgaagctgaccccgacggcgcgcaaccgttaacgaagagatttggacacctccgaataggtaggcaattgaacttgaaagagttgtggaagttgtcaagttaacatatttgtagaaaataacgtgccaatctccgctcgggccaaacccaaggggcatatccaacatatccagcatatccagcctcacattgaccaatatgaccaacataatcaacataaccaacgtaaccaagacctatcctcctcaaacgatgcaatgatcttggacgacaccaaacatacgacctacattcacaacctggatgaagaattaatggaagccgactctcctggcttggtgttttcaccattcgcagagaaagtgctctcagtccctcaatccgttctatccgactcgaagccctcggggaaagaactcgttctttatacggaaccatcttccctcacggttcccaaggaaaaggataatgttcgaaaggcaattcttgaatctcgagcgcgagctagagagaacaaggttacggaagatttatacgatgatccaatggatattgatagttaaaagtaattagggatagggaatgtataaacttgtacctttaggcatacaaatgtacgtgatctacatggtagtacatgggtgtactggactctacggagtacatatccaagtagttatcagattgcatacccgtatgtaaattaccgatcccctgtaatttaccgtaaccggactcacgtgactcaccgctcccgaaaaattttctggtttttttgtgtggctccgactaaatatgcactcggcttgataaaaaaaatttcctctctcccccaccatccctcttcccatccctccctcaaaatcacatctacaatttcataatggccgattctgaggtttacgacggtgccgtcggcatcgatcttggtacgtttttgctctactaaattcgaccgcacagctgctaattgccttttttctttttcttcaggcactacctactcttgtgttgccaactacgagggcaccaatgtcgagatcagtacgcttcccccctccaaatattcgatctttctctcgaatactgactatttgatcagttgccaacgaccagggtagctacactaccccctccttcgtctctttcaccgacaaggagcgtctgattggtgatgccgccaagaaccaggccgccatgaaccctgccaacactgttttcgatatcaagtgagttgaaaaaaaaaaacataaaaaaaacctcgcgcagcctatcaattcgcgatatgcgcattctccacaattccaaattcgttctgactctaatggaacaggcgtctgatcggtcgccgcttcgatgaccccattgtcaagaaggatgttgagtcctggcccttcaaggtcatcgaccagggtggcaaccccgttgtccaggttgagtaccttaacgagaccaagaccttctctccccaggagatctcctccatggtcctcatgaaggtatggcgaaatgtatatctcatatttgttggatttgtttgctgactatttgggccagatgaaagaggtcgctgagatcaagctcggcaagaaggttgagaaggctgtgatcaccgtgcccgcctacttcaacgacaaccagcgtcaggccaccaaggatgccggtgccatcgctggcctgaacgttctccgtatcatcaacgagcctactgctgccgctatcgcctacggtctcggcgccggcaagtctgagaaggagcgcaacgtcctcatctacgatctcggtggtggtaccttcgatgtctccctgttgaacatccagggtggtgtcttcactgttaaggctaccgctggtgacactcaccttggtggtcaggatttcgatactaacctccttgaccacttcaagaaggagttccagcgtaagactggcaaggatctctccggtgatgcacgtgctctccgtcgtcttcgcactgcttgcgagcgtgctaagcgtaccctgtccaacgctacccagaccaccgtcgagattgactctctcttcgacggtgaggacctcaactcctccatcactcgcgcccgtttcgaggacctcaacgccaaggctttctctggaaccctcgagcccgtccagcaggtccttaaggattctggcatgcctaagaacaaggttgacgagatcgtccttgttggtggctccacccgtattcctcgtatccagaagctcctgagcgacttcttcgatggcaagaagctcgagaaggtaagacaagacagcactacttgatctaacgtcaaagccagttacttatcttttttccaatagagcatcaaccccgatgaggctgttgcctacggtgctgccgttcaggccggtatcctctccggcaaggccacctcggctgagaccgctgacctgctcctccttgacgttgttcctctttcccttggtgttgccatggagggtaacattttcgcccccgttgtcaaccgtggccagactgtccccactatcaagaagcgcaccttcaccactgttgtcgataaccagagcactgtccaattccccgtctaccagggtgagcgtaccaactgtgctgacaacacctccctgggagagttcactcttgctccccttcctcccatgcgcgccggtgaggccgccctcgagtgtgtcttcgaggttgacgtcaacggtatcctgaaggtcaccgccactgagaagacctctggccgcactgccaacatcactatctccaacgctgttggcaagctttccagctccgagatcgaccagatggttgacggtatgtttctcccactaacactaatatttttgactatatgctgacttgacaatctgtagacgctgccaagttcaagaccagcgatgaggctttcaccaagcgcttcgagtctcgccagcagctcgagtcttacatctcccgtgtcgaggagattgtctctgaccccggtatgtccatgaagctcaagcgcggcaacaaggagcgcattgagtccgctctcagcgacgccatggcccagctcgaggttgaggactccacccccgaggacctcaagaagaaggagcttgctcttaagcgtctgattaccaaggccatggctacacggtaaatgcatacatgggaagacatgaacatagacttatggccaacgaatttttcctctttcccgggactctgcttctcagggaatctgcgccatgtagaccttgggcagggttggtctctgtcgcgctttgtttatgaagccgggcaacttgggcgcagttttcttttcttgaaaagtatgatttgatttgttttttgtagacgaagttcgccatctgcaatttaatgacattgtgatgatctcctctcattgtaatacttggaataccgggtagttctacatggtaatatagtgtatgatatttttggcctcgaggcggaagcgcgggggtaacgtgagagatacttctggactgcgcacctccgccctggaactttttacaacaatcgcttccaccatgcaacgcattatagcccaatcaattcgctcctcttgtcctcgtcttgtggaacaccctcaaacgactcgatctttatgtcttctaccccgagcccagcgcgccgttcctctgaaccggcgtgagtttgccaactcgcctgccttgtacaagaaaaaggacaaggccaagaaagcttccgcttccgcttccgcttctgagccagaggaaagctccagtgctccttccgaagatccctttgatctttcccaattgcacaatggcatctccacggctgttgctcggctaaaagatgatctgtccaagcttcgcgcaggagggcggttcaataccgcagtcctagagagtttgagggtccatctgagcaaagacagcaaagattcggtcaaattgggagatctggcgcaggttgtgccgaagggtggacgcatgattactcttttggcagccgaggaggatgtaagttcatgatgccttgttagggcgtgagcctgctattgctgtcccaacgagccaactctaatacatttcgagcagcacttgaaacctcttacttcagcgatcgtctcctcaaacctctccttgacccctcagcccgatcctcacaacgccctccagctcaacattcctattccgccacctacaaaagaatctcgggacaagaacgttcaagccgccaagcaagcattcgaaaaggctgccggtttagtacgtgactctagaggtgccatgcataaacgtcttcaggatatgcagaagaagaaattagctcggccagatgacgtgcgcaaagctcacgatcagatggagaagattacagaccagggtcaaaaggaggcgaaggatgcattcgaaggtgccaagaagacattggaacaggcctaagccaggaaaataatgagaatcataacatatggcatggcaatggccgattgtaaaaaagactttgtaaatctaggtacagacagaggcataattggggaagatatggggaggatatgggaagaacagaggaaaacccgatcaacgaaataaatataatacaaatcacttctagcacttagttcacatatcctcagacactcttggtcttgcggccagcagaaacaagagattcaattttggccatgaactgcgaggtcttcccggttgtctggtaggtcccgttgttccggaggttcttcaacacctctcccaatacggcatgcccatctttcccgacttcagacgtggggtagtttccctgaacgaacgtttccatgagagacttggtgctttctgcgtcgatgggactaaactcgacattccgtggctccacaaggtcacccttgcgctgtgaaattcgatcggcacgaagctgagccaatcgcttggtctcttccaaagcctccgccttctcgttctcattgttgaaaagaacgctctggcccttccacaggcgccttccaagctcatagggcgggatatagccgttggcaatgcggccgcccaggctggaaagcttttcgtagacggcagccgagcgcgagttcacgtctgtaggaattgaaggccatgtctctttcaaagtagagtagctgatctcctgaggctcataacgaataggcgttggcctggatttgatgatttgctcttgaagaatttgatcaatagccgccgcttcgccatcttcgccgtcgtcattctcaggggtttttgcgttcctgcgcggcccatttcggttacccttggcgcctttggcgaagggtttaggtttgcgattttgaggttgattgccgcctcgaatgtcgcgtgatctcgggctgcggataatcttaggttgctctccaccgctagctcgtgcggctgcaaaagatctagcgtcaatcactcgaggaggacgagtttgatactggttggtgcgagctggcgggccattgggattgcgaggccggtaggaaagcgtggccgatgaagagcggggattgggtttacggttgtctaatgggcttatgttagaattcaaattccagatggccgaaatagttgcgctactgcatttattttgcccagtgcggcttcccttggatgtacctaccggatggctgggctcgattttcggcggccactgtacgagtacaggagaactggcgagcaggtgtagaaagaccgagttttgtccgttcacagtgcagcgagatctgcctcagctgtggccgaaacatgttgtattctgaatgaactaggtcgtgtccctagaacgttttggtaaagagacgcggaaagattgaacgaataattgcagtcacgtgaggcaccgccttcctgcccgctccaagtaaacgcagccaagtcttcctttggttcattgcaatacctttcgactgtcaaaatgcttcgtcgaaagccaacggctattgctattacttctgaggacattgctgcctttgaagaagctagacttcgcaaactgtctgaagaaaacaaacacccagaacagcacgcaaaggcaacctccaatgtcaacatcgaccccagtgatgagctgaaaccacttccaggtgacaaggctaggattgtccgaacccgtgaagaaagaataggcattagtcgacgtggttgactgtctacaccacgatctcgaacccctagaccaccattgcatgttggaaggacttgttccacaccatgacatttggatatgaggtacataacccaattttgatatgcttgcatgtatttcttgccctttgaaacattgaattctcttttcgtcacatcattcaccattaacaagaaacaaatagtgcaggatctttggcgttgaggatatgacagtctcatacataacacacccaccatcttgcttgtatgaaagcgtatgacagagagtgatcgagcagtcatagagcgtggtttttttttttttgagcatcagatcacggcattcctctgatatatcaatctaaatatgccaacatatctcaccatttcccctatggttacctattggctaggacgttggtttaaccccagagaagcggaatggtacattggaatatcttgttaataaaacaacacaatgcatactactttgttcatctagatcacctccatcgggcatcttggaaaggaccaatcctttaagtgacctctctcttttggcctatttcgagatatgtttgttctgatcagaggctttagcttgaaaatagacacaaagcatcaaaaatattgacgagcgaggatgacccgagaatccatctcgtatagaacaagagtatttcaccactcctccgcccaatctgaatagtgtcttttccacgggtatcaattattttctaaatgtagtctactaaatagaccaattcatgtaagctgatgatgtatagcagggttcaggcatcaactactatcctagccggtgagatatcatgatggttggacgtgtctacctcaaacttttcctcattgagccatgcttatgtcccttggcggttgtgacgtgataaagaaaaacagagcaagatcgcacaaaaaagaaaaaaagaaaatagggatatagagtgataatagcaatggttgcctgggatacttaaacaagaacccgcaggccgtaaaatctggcgactgaattggagaaaaacaaggtcgtagatgatttgggtatatgtgcgtctcatcctctttggcgcttggacatattgtcggaggtaacatcaactgggtaattccaccggcgtttcagcccttgtggatcatacacactagcaacactttgttgccagtctcgcgctgaaaacacaacagggggtacctggaactgaggaggcgagagagactgggtagacgtgacagagggcactttgttaggtgtctcgtactggatggggtattgggagttcataacattttgtacacctggcactgaattgtttatagccattggcggggagtttgcgctgacggtagaggggttcacggagaaggccatatcccattgactagagcgaaggatcagtaagagaccaagcagaaggtgaatcatttacgtacgtgataattcgggtcggatcccagtggtctccatcgaccgacggggcatctagaggatgagttgtttgaggctgatgggcaaccattccgagggattgtatctgagaagatgtgtcggacttcgagtcttcagcatcagtcgagatcggaggggttaccggaagcggattgtaacgcactctagattggagttgactcaagtgcggatgatagtgtgcatccataggtggactgggatggtagggttccgaaggactcccgtatgggaaactgggcttcaactcgaaaggacgatgcatgtcggcggagaaagccagcctcaatgaatcgatttgagcttgaatctcaggcatgggccaggctgtggagcacgtctctagaattctcatatgacgggtgaagaattcacgggcatctgaattgaactcagggtcgggggaggtaattgcaacctgctcgcattagaatgggtttgctatgaaaaaaagaagaaagtcccataaattgttgaatacttaccaggtgcagcatcgtacaagtcaggatacaatatatggcaaaattgatgcctctttgcatgtaaagtaggccagatagcccgaatctttgcaagatagcttcttgtagtcgacagaggctttttgccgaggagtagcatagtgacatatgagtcttccattcaccaccggccgcaaaagattgagaagcgaagagttgagggcgatgtaacataataatggcgagatggcaatgggaatgcatattgcccacaaaatgggatggaagccacggtggggagccaccggcaggataattgacctgcaggtctggaggaaggttacgaagccattctgcgaaaagcgggttgatttgtacgaatcgggcatctgcgccccagtccttttgcttcttaactttgtgatagatatctgtaatgatgcggatgtgatgtgcgttgcgaacgaaataggcgtattgtcttgagcggtcgatctcataatgatcgagacctctgatgtctagcgtcggacgcatgtccaccgtctcaggatcaacaccgtaatccgaacggcctactttgatcagaagctggttgatttaataaaggatgcgacggagtagacttaccttggggcccaccgatcatcacctcaaccaccaaaagagcctgccacactctggtgtgcaccaagcattcgattggtccgagttcacagggcttgccatcggcgtgattgctgtaatgttcatgaatgtccaaatctttcgccattgagacaatcgtcttaacagtctgccaggatcgataatagtatcctttcttcggcaaagattcccttgcttttagtagcagaattaatgcttggatagtactcagacgtggtacatccatgaagctagtctcgtgtcctatgaaacgtcagtcttttgaagatggctggacgaatatcaagtatcgactcacggttagccaaagcaagccactgagcgccttctgcaggttcatcagataaacggcccgcgcaggcaaaaagggcctcgagaaggagaggagagatagaatggcgatcatgctgccattgatagtacagatgggcacgagatacgacaggaacatagggatgtatttcatcaaagtagatcttgaaataagccataacgtcgtcttcggcaggcatgagctcaggggggattcgaatcgtcacgcccgatcccgttctgagaggtggaaattgctcttcaacgtcgtcttggacaggggcgtcgggctcaattcgatcggtgcgttgccttctaatgtatggggctatcgaaggtagagtgttagcggggaaatccgtagaacgggtaatgatgccataccaatcccactctcgtcaatcttcaactccccaagtacatcactgaggttttctgcagttgactgatcgttatcaatatacacattccgatccgatggacccatggacgaagtttgcggccccggaaacatttgagactgttggaaagtctggtgtgacattgtcatttgtggtgactgaagatcgttgtagatgttgggttgagcctgaggagggacgaattgggaatacatgctcatgtgatcatatgaggggatagtattcatggttggttgactgttgtccttgaagaccggagctgctggaaatgtatgagaaccctcggctgcggcggaggggcctccggtctctagagtcgactcgccctggccatcagggagaaagtccccatcttgcccgatggtcggagggacacagactagctttagacgagtgcatgcagaacaaggccatgtatttgtcgtagccgcatcacatttgattttccttttccggcaaccgttacaggctcgcatcactaaacgtcaggcttgtcagtatgtttttgttgacttgcgatggacacttttcctacccttcagcctcttatgtcggttatgctcatcaacgaacacatagtctacaccgatgaatggttagttgtcaatgaaatgtgtaagggatagatggtgcttgagggtcatacttttctggccttctctcggggggcccgttgggggcgcaaatgaataaccttgcatgcttgcccgtttgataacaagtgtcgggtttgtaaaatggcgtagactgtgatgatagaggcaactcaagttggtattgggactatcagggtatcaagaaaggaaaacaaaaactgtgctgggaggcctatccacaaggacctgcctcgggaaattgaaggagtgagagaaggtggaggtcgaacctcgctctgcgagatggatcgaactgcaccaagagacgataaggcaggatggtggaatctgtgggagtagtcgaggcgcaagcggattaatcggggcagacaacggctatggttgcaacaaattctagagacgttgctcaatgacagatttcaggttgtcccaatgttgcgaccaacttgctgaggcttcgcgggaaattgaccggcagcagtcgccaaagtcccgagacgtgcaagtgtcctgcgaggctgttatgggttgggagatttgcgctctcgtatatcaagcgcgtggggctagacacggaaacaagatcaggccgtctttggtctcgaatgtatgtaatgaacaaatagtcgaatgctgtcataagtaccgggcagattagcgtcggttcccacacatatgatccagatcaaataaaatcacacagaaaaacattgagagtacccccgaggcagctgcttacgattcaggtaaatagaagggtttcgggtgcatatccatcgatgtcaatgtcgcaaagtactccgcattcgaatcaacgagcctggcgcattgcatctcagtagggaagaagcggaagaagcgcagagcattaggaagagcagcaacgcaggttcacaggtggaggcatagagacattggcgaataggctgtagtagttcaagaatccccggggagaaaaaagaaaaggggaaaattcgagcttgttgtgagagagggagggagggagagagaaggtcagaagctgaggggtgggaggtaccgcgggtgccaagtgtggaagaggatccaatagcgcccgccgctgtggatttagggtggaggggcgatccggactggtgattttctatattttctgtttatgaggtagcttatggagatctagggctggatttattctggcagagacatcgaggaattattccagtggattgtcgcgtataacatactacgtacacctatataaggtagggttatatagcggttgatgaatcagggatgagggagtctccacttaggagcgatactgttaccttagtgaatcagtagtaagttttatgctagttgactactattacaataattatcattatgtacgtggttatatagagtgccgggtatacggagtacctagtacctagtacctaggtacatatgtacacctgtaacatatgtacctataactatatgtagtgattcaattagggaaaaagcaatccaagaataaacacaagtgaatctttctgaaacagccccaattattcgggaaaaagacacgttctgtgaaactcgagaatcagccaaaactgccgtgacttcggacacataatgagtttaaagccaaactcggcctgtcgatcagccgcggggattgtcaggttacatacggacggagtaactttagccctattctgagggatagagtgggattactaatgatgtattaagattactaatgatatactaatccagacaatataacggagtagttaagtagagttatcatggatattccaattaaaactctggcaaattagatatgctgctcatcaaatccctcaaaatatagaatcccttttcacagactgtccccaggtactccatactccatacgccgtacgcggagtcatccagtactcgcacgtggacaggataagctggtaaacgttatcgccgcaatttttaccctcaacacactacctctactcgaccacagaccacattacccctacccctcgttcatcatggcggaaatgcaaaattcaaaccccacgatcctcaatgccgctgatctccccacgcggttgcgacccaccaccactcgaaagtccgaatatggtggtatctttacatcggccctgcccctcgccccagtagacttcgagagtcctccgtcatcggactcggaggatgacaacctactagaggagcctattgatgaacaggaaatatatggtaagcctctctctcacatatctctcccaggaaaagaaaaagcccatatgtccgagatgattggcctagctcaagtccactaaaaccgtcagacctcatctcgtcaatctccgatccggaacaccccatctcactcggtgaattagccgtggtctctctcccagatatcatgatcaagccaaccctccctgacgtccctgattcgcctcttcaaactgtcaccgtgctgatcacgcccacaatcactcactgcagtctggcaaccgtcatcggtcttggcgtccgtgttcgtctggaacaatctctcccctccagattcaggatggatgtgcgtattaaggaaggtacacatagcaccggggacgaagttaataagcagctcgccgataaggagcgtgttgctgcggccttggagaatggtgcgttgatgggggtcattgccaaaatgatggagacctgccactgaaatttcaaataccctttgtatactataagccgggtcctcgaggtaacgagctatcactggcagatagaccaggccctcttgtgtgacgaccgcctacgatgaatgactcttccggatttttaaatgacttgcattggaatgagtattagaagtacatatgaactttgataccaccataagattgatcaaaccggatcaaaggactcctcctgtagccaaccctatttcgagtagtgaaattttttgaggtcatgagtctagcacgccactttccttcaaacccttccaaagctccggctccaaaaacttactcacagtaacatcctcggccaggcccttgcgtctccgtgttttcaagacaaagtcacgcgcagtagccatggcaggagccatctccaagggcttgagcttgatatcacggtccagtggatcaccaggaaccacactccacttatcgaagacaaggtttaccatagcctgaccttgtgtgtgaattcgaagatcggtctcaaatccaaacgagtcaatcactgggatcaaaccgcgtacggagtaaagaggagttcccgcaatgggaccatccgacaggacgtgacctcttcggcgcgacaagactgtgtacaccgaagccacggagtctgcaggtcctgtcattgtgacagagtagatcggttccatgagacgcggagatgccataaggaacgacgagtatacagcacgacgggctgtagggatgatctggcctccaccgcggtagatagcttgatcggccagggacacgtccgtgagcctaaactttgtgtttcgaatggctgaacttcaattagtctcacattcgtcatatgcgaatgagaagggggaaagaaaacttacgttcttcacaaagagggccttctcgtgtaccccagctgaagccttgggtgatagagtccctgacagtaccgagaagtttcttatccacttgagagggtaaagtgtcatcttggagtatgttgggacccatttcatccggtccaaacgcccagatgcttcgcgctgcaagcttatcccaatcgtaattttcctcaaagtatcgagcaaccttccgaatagggtccttgatactgactttaccactttcaatatcctctgcaatcccatcatctaaaggctccgcaatcatcgtgattttattcttcttattcggagtgattgagtaacacatgatggcagaggtttccaccacagtctcacagaaacgtgtaacggggtcggagaccttgatctccatctccgagtatagtttccggaggtcatggagcacacagtccatgtaaagctcgccggttcctagaaccacatgctcgccagactcctcaactttggttgagatgagggggtagctcttgttaattttccgcaatccatccaacattttgggaagttcggatggattgaccggctcaacggcgaccttgaacactgattcggtcatgtgacgaatcgggcggaagatgtacacatcctcgtcatcttcaagcttaaggggtaccagcgtcgcagtcttcacaatggagttgtcgacaccacccaaaagaacccaatttccggcggggacaccgttggtcgggatgttgtaacgcgtttccgcgatccacgtgtcggagatggttgctaccaccatgtcttcttcatcttctggcgtgtagccctcgccgagtacacggacctgctgaccaggccgcgctgtgccactcataattcttccaaaagagtagaagcttgcggcatcagtactgctgaagagtttggtaacatgtattaccaacggtccgttttgatcacaagcgagcatcgaggccccaattttggtatccacgggcccagtgtagtatcgctccaggaacctttgggcaccttccaccggggaaggaacgtgttgaacaaccatatccacgaagccagtggccggcccgaagaaattctcacagactagactgagcagctccttggcatcaatcttgagctgagatggcttcaaattgacgccgacgctagccagagtctgtttcaaatcctcgggactctcgctaagtgtgtgggagtagagtttgtagatcggctccaagacaaacttgacgaatgaccgctttgcgttctcctccactcctttgcgagtgaactttcggctctggggattgtagaagatgtcaccccaaagtcgcgcggcaaattctgtcgagtccaagctcggataactgtctgcgtacatcctggcaaatgactgcaatgtaaagcaccagttcattgagcttgatgcgaatccaacattgcccttctcggggctcagtcggagtcgctcgccttggcctggcaaaacgttctcaataatcgtattgacctcttcgatcacatgcttcaatttgaaataggcatcattgggaggaagtttgagctccagaataagtcgatccatcttgttgactaccaaggtcaaggggagaccttccaatactgcatgcttgataatttgctcagtgttcgcctggacaccctcgacaacatccacaactaataccgcaccatcagctaggcggatagaggcagccacctcatcaacaaaattcacatgcccgggggtatcaaggaggttgagcaggtgagatttgcctttggtgcttggaagaacgagactcatcggtgccgatttgattgagagaccgcgttctctctctaggaaatgaacgtctgtgtatcgcagttgttcttctctcttgcgtcctgtgcgcttgtccagccgctctgttaggtcgtgtgtctgtttgaccaacatatccatgaaagcggtctttccatgatgcaggtgaccgacgattgcaacgtttcttatctgtgatgggaaactcaagagatctgacatgaactcccgggaaaagtatacaggtgggagttcggtctctgcgatcgcaaatttcttctgctggacgggggcaatgatgggctccgacaatggctgagcatcttcctcctggaccatggtttcaacatcctcgccgtagacttgttgtgcgctggggtagtattgcttgtcttcgtgcaagatgaccgcatttgaaggaccctctagacgtgagattagtgagattgcaggctttgaagaagacatattgacataccatcaacttccatcaactgtagatcatttatctcctcttcttcttcatcgtcaaaagcctcatcgaacttaaaggcttgaggttggacatcttcatggtgctcctcgtccgattccgcatcgccgatgtagttaccaaatctaggcacaattagcaaggctccagatttagagagtcaaaagaaacatactcatcatagaggtcatccataatgaatcgtagagaacgcgagcgtgtgaggtaaaaaaaagagggacccgtagctccagacgcgtgatgccggaggatctcaactttcacctggtccgagcgtctcttcggagtactcgtgcctacaccgtacagctcctcactccccaccatataatttactcttatagatgcccctccctctttgatcttttggatctttctttacttctctaaaatcctctctacttctgtatactcttccggtcttccctacttccaccaccttttctttctccaaaatgtcttctcttcctcctgtctacattgtttctactgcccgtactcccgtgggctctttcctggggtgagcatgcttgcattcgtcttttcccccttgaagacttgatctgacatcggttactgtagctccctgtctagcttgactgctcctcagcttggtgcacatgccattaagggtagggcatataccccaagctatactatacctattttcaatgctaatagtaacttgcagccgctgttgaacgggccgagggtatcaatgcctctgacgttgaggaagtcttcttcggtaacgtcttgtctgctgggtaagttatctttgctacatcttatactgcaattgagattgacgtattccttatagtgttggacaaaatcccgccagacagtgcgccctcggtgctggccttaccgattctaccatctgcactactgtcaacaaggtctgtgcttctggcctgaaggccatcattcttggtgcccagactatcatgaccggaaacgcggatattgttgtcgctggtggtaccgagtccatgtctaacacccctcactatctgcaaacatctcgcagcggtaccaagtttggtagccaggccctagttgacggcatccagaatgatggtttgactgatgcctacggcaagcacgatctcatgggtgttgcggccgaggagtgtgccgcggagcacggcttcaaccgtactcagcaggatgactatgctatccgcagctatgagaaggcccaggctgcccagaagtccggtgcatttgacaacgagattgcccctattgagatccccggcttccgtggcaagcctggcgtgactgtttcccgggatgaggaacccaagaacgtgagttcctcttgttctctgcgttagatttattgtgacgttcattgaccgttctttgcgacttatagctcaaccctgagaagctccgcgctataaagcccgccttcattccgggaactggaaccgtgaccgcccccaactcttcgcccctgaacgatggttctgcagccgttgtcttggtttccgaggctaaggtgaaggagctgggcctcaagcctattgccaagattctaggttggggagatgctgagcaacagcccagcaagttcactactgctcctgctttggctatccccaaggctctcaagcacgccggtgtgagccaggagtccatcgatgcctttgagatcaacgaggccttcagtgttgtggctcttgccaatatgaagctccttggtctctctgaggataaggtcaacatccacggtggtgcagtcgccattggacaccctctcggtgccagtggtgcccgtattgtgtctaccttgctcggtgtcttgagcgccaaggagggcaagcttggctgcgtcggcatctgcaacggtggcggcggtgccagcgccctggttattgagtctctttaaatagtaaattctgttaaggaaaaaaacagagatgtgaaacgaccttcgatctttgcatatgagataccaatttcatttttgacggggaagatactcggtggttttctgcagacataccatacccatcctgcagcgacgaacattcgcagtatcagtaccatttcttagtatctagaatagttaatgaaatatcttgtatgtttgtgtccttccagttgttgcttcgggggttggtctgagatgaagtcagagattccagcatttcaacaccaatgtactcagtttaatattgttggtcactagactattggatggcatcaatgtgttttaataaatgatacagggtatgtctgtaaagcagtcactctgccccagtgagaatattaacttcattagcctgattttgtgtacatctccgctaaatttaggacagccatgctgcctcaaacccgaaaaagacaagagaacattaagaaaaatcgtttttgggagagaaatatgaaagagtgatatcggggatgctgtaagacatatgcctctgtagactgcatttatatcggtggatataccagccctgagtgttgcagtgcgttgtcccgctcgagtcatcaagtcggcatgtagataatgcaagtgttccatgtgtttcatgagaatccccagaattaatatatatcagtatataattcctcaagtgaacatagtactattaatttggtatacatttagaaaaagtatcgcatgcgtcgttaatctatcagacattataattgagaaaccccacaaaacaagaactcatgctttcaagcaaaggctccgacgaatgccatgaggagagcaccgcaggcaacagaaacacatgcctcaacgcgtcgtctgcccttgagggtctcataactcgactcactcaagaagtcctcggcgaggagttccaccaggcccgcgaagagcaaaagaccgctgctaatggcattggtgatgccaaccattagcaaacctgttgcgctgccaggatcgtagaggttgtgtagaaccaaaccgatagcctggccaagaggagttgtcgttccgtatgctagtgacataagccatggtttcattgaattcggcgcgaacagatccggtatgagcgacgcaatccgagatcctagggcaaacccttcaaaggtctgatgaaaactgattgcaattaacagaacgacaaaggaggtgccagtcgcaacactgagcgccatgccgatgaagatgctgtgaaacaaaatgccagcttccaagaggaggcactgtagaagctgacgttgcggattctggattggcacatctgtgtcggtctgctgacagtggctttcgcttacacgggatcgatgccggtggacaggctgtgactgcgcagaatgagcttgtccactgataagtccgtcgtcatccatgtagtcatccagtccatcaaggtcatcttcatcgtcctctttatccggtgatgagtccgccaggtgaaggcggtccgattcatgggacgagcttgaagctctcgtcgtccgcaacttggagttgtgtcccatgctatctagattgagattatctgaaacctgccgggcctctaggcccgagtaatcaatatctgcgttccccccgtcacgtattgagccacgcctaacctcgccaatgagattatcatattcgcttccatgcacgtgcttggcgcctttcattgcaaagaacatttccacgataacaacggcaaagaccgatatcattgcaacaaaacctggcatagcacgatatgtttgactccaaaatcgagggagacatggatcggtcagagagacaaatgctgtggggagcagatgtacgaatgccgtcgcaatcaacacacccgttccaaaatgtctcgatatgaagaggaaccgacggggaatcggaagacgagggaaacggcgcgccagaaccggaaaggagcaagctattgtaatcccagtattagcaatggccagtcagagagccgagagaagccagtgcataccgaatgtactcagccctaggatgaggaacagtgccataacatgcaacggggtgttatatttcccccgctgtttagatccgcatgccggtgtgtcctctgaagctccacctcgccgaagaagttctgctcgcaagagagcatcggggatttctgagattgcggagagggcacgcttcaagtctactcggaacatagttagaaactgtccacgatcaatttgcaaagacagctaacctgagggtagatccttcgcagtctgccagtcttgggcattctgcattttgttatagtctcgaatttgttgagctgtaaccacatccccagttggagaggggaattgttcgtaggccgggtaactgtccaagagatataggtatagtgacgcaattgggttaagataaagatgagactacacgagatggtcgatcaggaagacaacaaaaccagcagagatattattttaaaacaaaaaggccagacggtggtttttcagacgcgatccagtgagtcttgaactccggggctgcccctttcgcttagtcatacatactacgcacgtgggcaagacgagtcctgtgatttattgcagtgaagttgccgagaagtgatctgattagataaaataacatcttaggcggctccatgtcctctatctgctaccttagtccatcccttggtacctttgggtcgtgaggaagaggcatcttggccttgagtcctagaacgtgtttttgaagttctctctgtttccaccgatccgaattgagagcccatggccttggggctttgcggaacagatggctgaggggaatccatgaccgcatcgtcccattctttttcttctagcaattcccattccgcactggccatttcccctagaagattggacttcaatttatctacgatcctggttggggttgggagtttccatattcgcatgaattcaactccttctgatgctcccaggaaagaatgtgccgtgccatgagaatagtgacccaacatgggaaaggaagttgtccgctgaatcgtggttctgggagagtcttttgcagatttcatttgtgtctgtgtgtctcggccggcaaatactcgcatcagagttgaagggtgggctggcggagctaccagcagttgccacaagctctttccgatgtcgcaaacttcctcccaggagtccgatgagaggtttatcccttgagttcgacataaccatgcaacattccatgccaagagggtggctccttcaagaaagaaggcgtatgttgcgggatcttccttcgctaaccggggcagaggcttatcgatgaagagaggccgcgggcgtgatgtgtgggtgcgcgggtccaccgtcctcgatgcagccgggctcgacgaagattggtaatcagctccatcgtgaccgttgcgcgagcgatatgatgccgagggggtgtagatcgtaggtacaggatagtttttgtgaggcagtgtaatttcggcgggaagtctcaaggaaagatagtgtgagacaatgatcagaagatgagcgatgttagaaaaagacgtggatatctgttcctgtggaatacctgtactcgctctgttagtacgccacgagatgaataactgcttgaaagcgacctcgggactatggaaacttgccattcatatctctcaagtcaacgatcaaaccacatccaagcacataggtctcccgaccttggcccttcttcgtcgccttccgcaggccatagagattggcgacttctcgacaaagataaatacgtgactccgccgtcttgctatggagggaatgccaaacgtgctccacccgtttgctggtattttgaacgcccgccaaaattccagtctcccgctcttctagttgaaagttggcagattcagcatccgaccgtctgcgtgctagggcttctttttgcttggcaatctcggcttttttggcttcgacctctaatttcaaagcctcaagctgatgcgaaaccaattgtctctttgccaaagacactgcatgtctagtgcttatcatttggaggacccagcggggagagcaagctttgtccgtatcgagcaggtcttgtccgtgcggggaaggctcatcccacgagctaccgcaggtaacagcggtctcgatctgctttccaaggacttctttctctagaagaacttgagtgctgtcgattcgtagttgatatagctgattgcgggcacatgtcggacagtggaaagaaaggcgagattgaggggcacgcgagcatatggaacagctcatcgtagacaatttgattttattttcagctgttctttgaaggcgtaaggggcatttccatgttgcgttccaggataattatgggtgctacttgagtcgccgccgagaaccatatagaggagtgagaaggggtcgtcaaagagataataatcccacatgactcaaataatacgttgatatagaggatatgaccggcctcaagacatcacctttagccaatcttttagaggaaggaagtgaagaaaagacgggatgatgttcacatgcacctgtcgtcacctgacgctccgttatcgcaatcttatctctcattttggataagggcatctggaacattcacgaatcgaaacaaaagtgacttctaaatctactgaaacaatcatcggtcttggtatggcttgattttgacacctcatcatatcgagtcagcaaatccagtatgcaggcaacaccaaacaggaccagcaaaattcctcgacgggggacaatgtcaccccgtgtcagccaaggaagcaaaagccctacgggcagtgggagcccccaagagaacggaagccctcaattaccggtcgaagatctagcatctacatctatccatgatgaagccccatttgcttctaggttgacacaagggctggaggactgcaattgggaacaactccaggggaaatatgccgatgcaatggacgaacacggccgagtagaagagaacattcgtgttgaaacagccaagcttcttgaagtaagtctcaaagcatgttctacttgcaattttgtatctgagcaatcggtaggctttcatggcatggtctcaaactactgtttcgcaagatgagaacagggctttgaaaaggttcgatcaatccagctttggtttaagatatcgattaattctctacaggttcaaaacccaaatgcagcacgttcaaaattccgaagtcaatgtggaaaacaaaaagaagcattgtaagtatcttgtcctcgtgacttgaaaacaagatctgtttgctgatctgtctaaagatgaggaagtagtaaaggctttccaaaatgcacttgccttgctaaacgatcaaatgaagatttgagcaaatgattgacacgatatttatgattatgagtttatgttaccccatcccttctcatctgaaaatcgatcttcaagacagaaattgcaccagtatgcaagaagctatccagtgtgtctcacctacgatggcctaaaaagaaaaagatcaaatcattgaaaaatgaatgtactacaaaaagagacagttgatattatgggagtcatccaaatgggactgctaggaatatcaccaatcattattgcaggcgaaagagttacaggttggtagtctgggagaatacgaggctctggactctagtcactatcattttaaggcctcggtgattattcccgggggcggtcactccgggtagctctccctgtgatatcttgccagctggcgttgaagcgtctgccggtgttggccaataaaccttcctcctcagcttcctctgcatcgtcgtcgagttgcgcttcatccaactgaggtgaacggagaagggaagtaacaaagacaattagatataagcctgtgatgttggtgttagataaacgcgaacatggaactctggtaggaatgcaacaagacaagattgagacttaccgaggaagaagaactgagcccaaaagaacaccactccaaagaatgggtagttcagcgtgacccggttcaagaaggtgctcacgacacttggtgtgcagacttgctgcgcagcaggattcttcgccaactctgagcatggcttgataagttctttggtgtttgaacaatctggcattccaatgaaagctcccggagcgcgatcgcagaatgtctgtggcccaaatgtcgcatactggggcgcgactatcattgaaatcgaataattcagcgctaaaatgatcagcatcaacatggcggtggccaaaagtagagcctggggagatgtgtggccgtttctgatttggaaaatcctgacccataggaagcggattccgaccacggcgattccaaccacagaactgcagaaaaatagcaatacaagtgcagtaaatatggcatagtcaatgggaaagaacctggcagatttaacaagtgcccagttgacgggattaaagatgttgacatgtgcgaggatgtatccacaacgatgcttgcaaatcgaattctttgctttgtcaattgcggtcaagagcatggatacccacgttaagaaagcaatgaatagcagcaagacgccccccaggagcttgaagggacggaatactgctccaagtttgtaccatgcccttatcaaccagctgcggcctccgccttgggattcttcggctaggcgttggcgccgaatcagggtcctttcttcccgcactagtgtatcaagttctcgacgatctttggaggacagaaggtcgggatctccggcacatcgtccctcaagctgccgttgccgctcctggtttacgtcaagttgttgtgtggtgctcgctcgcagggtagcactagagattgatggtgcagtcttgatcaaactgattggcagaagggccagtcccacggatgtgtataagacataaagacagagcccaattgtcatcaacagaccgagagcaaaagtgagagcgcgctccccatcttttcagagttatgtcagcttcacatttgtgttacacgacagaatactcgaatactcacgattttcagtcagtaagcgcctgaagtaatccaggtccatatcattctttcctcgtgacactgggacgaagaagccaactaagaacaagatcacgacgactgcaaagaatgagagagtgtatttgagggcaccccaaatccgttggcccaaagtttggtccccctcctcggtcgcaacctcatcatattcctcataccagaaatatgtgaaggggatgaccagaagacagagcaaggcatccaaagagtagagaagatagtagatgatggtcaaggaataagtgattctgtccaccacatcctgtgttgcccagtcctttcgctggcctaactcggacgatgtagtcgatgataccaaagcgacatcgacaggcagcagaagcactgttgcgagaagactagtaattgagatgatgcaagccagagtgactgaaggagagcggtcacggggagtttggtagacgtagataaacactgacgccactgccagtagaatagctaccaccaccccatacacagcccagatgagggaagtctgaaggagtgccatattgaaggatagcagttcacactatgcagattgaggtctgcatcaacactcctagcaaaatactaaaggaatgatgcgaggaatgaaacttcacaaatacaccaaatatcaaaacaagaaaaatgatcttcccttccggaagctatcgcctgtgtcgtcattgatcgtctgacgctaacccattttgaggcatctacagccaagggcggtatgatttatccagcagaatagattgaccgcttaattctgccaggccagtcagctgacccgcttctgtctccgctttgcttccgcttcgaaggagctacaaacttcactgcacaagacagagatcaatctggatcttgatcttgatcgcttctcgtgttaatattgaaacttttatctgtgtcatctctttttttttgcaaagctttccattcccagttttccccctaggtttgcaattgcaatgtgcatctcaggccatatcaaaaacacaatttagctcattagcggttctctagcagtatcaagcctttcacgagctttgtcggtggacgaaaacttcaaatgcagtgctacacggagcttttaccccctacgggggtcacccatgctttggcagttcctttcatctcagcaaccaccagcaatttgattgttgtcagaacctctctattgcaggttttctctctcgttaaggtcacctcctctcaaccacagacggaagattcagagcctcattcttcacaattttctcagccagaaacaaaattagtactggaaaacgaatacccgctatccggaactgtgactgatttaagccgagtcaaaatcttgaataccaagagtggcggagaagccatattgattgcagtccgcaatgccaagcttagcttgattgagtgggaccctgagcgtcatggaatctcaacaatttccatccattactatgagcgggatgatctgacccgcagcccctgggtgcctgacctgagccggtgtgggagcattctgagcgttgacccaagcagtagatgcgcggtgttcaactttggaattcgcaatcttgctattttgccctttcatcaggcgggcgatgacttggtaatggatgactacgattcagagcttgacggagaacgcccaacaaatcagaactctggcggaggagcgcagatcgagaatggcaaagaagaatcagcacaccaaacaccctactcctcctccttcgtcctgccattgactgccttggatccttcattgctgcaccctataagtctcgcgttcctatacgaatacagggagccgacgtttggtattctatattctcaagtcgcaacctccactgctcttcttcatgaaagaaaggacgtggtattctatgctgtgtttacactggaccttgagcagcgagcttcgaccacccttctttcggtatctcgtcttcctagtgatctattcaaggtcgtggcactcccacttccagtaggaggtgccttgctccttggctcaaatgagattgttcatgtggaccaagccggtaaaaccaatgcggtgggagtcaacgaattttcaaggcaggtttctacattttcaatgaccgaccaatcggacttggcgttccgcctcgaacgctgcgtggttgagcgacttggtggtggtagcggtgacctgctcctggctcttgcatccggcgacatggcactaatcaaattcaaacttgatggtcgatctgtctccggtatcactgttcacccccttccagcgcatgcaggtggagatattttgaagtcggccgcctcatgctccacctgtctcggggatcgaaacgtcttcatcggcagcgaagatgccgactcggtgctcctagaatggtcgcattcatccgcctccactaaaaaatctcggcttgaatcaaaacaagcagccgatggtcatgatgatctgtcggaagatgatgaccagatggaggatgatgacctttattcctctgcgcctgggtcgacacaagtcgataatcgcatgggaaccgacaactcaacccccgaattttataactttcgactgaacgatcaactgtctagcattgggccactgagggacctcactttgggcaaagctttctcgaatacgaatggcaaaagccaatctccaagtgaaaccgttgccgcagaactggatttggtggcatctcagggttcagatagaggcggcggcttggtagtcatcaaacgtgaaattgatcctttgactatcatgtctctgaaagccgatgatgcggatggtgtttggtcagctagtgtcacaaaaaagagaggagctcccagcacagacaatccctcctgtcaatatgtgattatctctcggcctacggatttggagcaggaggtgaacgagctcttcgtcgtggaagaacaaaccttgaagcctttcaaagcacccgagttcaacccaaatgaagattgcacggttgatattgggtctttggcagggggtactcgtctggttcaggtcctgcagaatgaagtcagaagctacgacataggtacatttcaatttagcgtgctagcaaacattgcataagctaattgtgaaactctacagatctcggattgtcacagatttaccccgtttgggatgaagacaccagtgatgagcgtgcggctgtgagcgcaagctttgtggatccttatcttgtgattattcgggatgattcatcggtattgcttctgcaggcggataagagtggtgacctcgatgaagttccgctttcagatgagattagcttgtcacaatggcgctccggctgcctttatcacgataattcacagtcattcagcgttgcaggctcatcgtcgaaggactttccagaaggcgaaatgattttattcctattgaatctggagtataagctatcggtaggtcgtcgcgaccaggaatttcaggcgttggttctgacttgcaatacagattttccgactttctagcatgaagttgatcgcgataattgaaggcgtcgactgcctaccacccgtattatcgaccgagccgcccaaacgatctaatactcgggaaatactgacagaatttgtggttgccgatcttggtgatagttctagtatttcaccttatctgattgtaagaaccttttgtcagtccatcgctttctctgctctctgactcatgcatttaggttcgaaccgaaaatgacgatctcgtgttctacaaaccaagcctaatcccggcaaaggctggccatgagtcgtctcgtcgcttgcaattattccgagagtcaaatcatgttctgccaaaaagttcaggggaggtatcctcccaaatacagaagcaacagcgattgagaccgctgagggttcttcctaataactcagggtttagcaccatctttatgccgggagcttcatcaagctttgtctttaggacagcaaagagctcaccgcacatcattcgtcttcgaggaggctttacacgttggctaagttcctttgattcggccaacactggctgtgaaaatgggttcatttacgttgattctcaggtaaggttcttcattcggagttgtgatgccatgtatattcactaattctctctttgtagagctgtatccgggtttgtcaactaccttcccaaacccaatttgactatccgtggacattgcggaagattccaattgaagagcaagtcgatttcttggcctactcgacgtcttctgagacgtatgttctcggcacaagccatcaaggagacttcaagttgccggagggtgatgacttgcaccctgagtggcggaatgaaggttcgtgtttgcttcaagcgtttcccatcatgctgtgctaatttaatcctaagagttatcattctgtccgaaaattcccgaaagtagcatcaaggtcgtcagtcctaagacatggaccattattgacaggtaaaaacgcccacaaagctcgagtcatgacgagtccgaatactaatatttatagttaccctctggatcccgatgagcaggtgaccgcggtgaaaaacgtgaacattgaggtctcggagaatacgcacgagcggagggatctaatcgtcgtcggaacggcgattgctaaaggggaagatatgccagctcgcgggacgatctatgtctttgatgtgatccaagtggctccggaccccgaaaagccagagacaggccgcaaactcaagctaattggcaaggagtcagtgaagggtgcagtgaccgctctgtctggcatcggtggtcaagggttcataatcgtcgcccagggacagaagtgcatggtacgaggtctcaaggaagacgggagccttcttcccgttgcatttatggacatgcaatgctacgtcgatgtcgcaaaagagctcaagggtaccggcatggttatcctgggagatgccgtgaaaggactctggttcgccggctactcagaggagccatatagaatgacactcttcggcaaggaccccgaatacctggaggtggtggcagcggacttcctcccggatgggaacaagctgtacatgctagtcgccgacagcgactgcaacctgcacgtcctgcaatacgaccccgaagaccccaagtcctccaatggcgaccgactcctcagccgaagcaaattctacaccggtaacttcgcatcatcggtaacgcttctacctcgcacagcagtttcatcggaactcgccgagtcatccgaagaagcaatggacgtggatgagaccttcgccagacatcaggttctcatcacttcgcaaaacgggtctttggcgcttgtgacatcagtggctgaggagacataccgtcgactgtcggcactacagtctcagctgatcaacaccgtcgaccaccctgccggtctgaacccacgtgctttccgggcgattgaaagtgatggcgctgcgggccggggtatggttgatggcaatctattgcgtctatggctgaatatgggcaagcagcggcaggctgagattgcgggtcgggtcggcgcggcggagtgggagatcagggctgatctggagaccattggcggtgatggactcggctatttatgatgccggcaacagacgcctttcggtgcattagtttagagggaaattccaaaaacggactcactgggtgagcttactcttgcagtttgatcctatcatgtctacgtctccgtaagataaaagagaagggtcagcccaagataggatttcaatatattgatggcacgagaacatgtatagctgaagttctctcggccacaagatcaagtaaatagcgtaatatcataacacaatgggatataactaaaccacacaaaaggagacacagatagaaaaaaaagagaccccagtgccaatcccaatccagtccaacgtgggtaatccaagtaaatccaagtaaatccaaaaacccagccaatccctaaatccacaaaacaaaagagataaatcaagacaaaacaccgcattcgccattctcgccttgcacgattcgaattcaaagataagaatcaaatgcttgaaatcattcgtgcctcccatgagcatcaatatcagtaacacattcagcatgtcagcttggagtcaaccatattttgtgcttcgtgttctatgggcaaacacaaagccaagtctaaaaaacgtcaagaaacaccaaccccagggtgataatgcagatgcgagaaggaaaaggacaaacgccactcagcgccattaccccagcatcccagtgctggggagtttagaacacatcttctgcggtaaagtaccgcttattccggcctctggccacaaatttcatctccggcatgttggtgtgatgcactacatgtggtcgatagacagcgtcgacaggggcttgccattcatccatgccgagggggaagtactcatagagaagatcatcgttttcgttcgggaaggggagcgacgatgcgaatgactggggcaggttggcagtctctagcaagggcatagatgaagcaacgctccgcgagggggtctgggagacagcatgcgagagcttgcgcatcttagaaggcgggaccgactggtcaagactcagggatcgctgatgtgacaactcggcagcgaaaggggacaccatcttttgctcaagatgaaggttatggtcaccgctctcttcctcgtctagcaatgacagattgatcggtgcagcggccgctgtcgtggaattgactcgacgatgtgagtcagtcgcctgggagagttgctccgggctggattgacggaacatggacttcggggcatgagacatgacattgttcgacgtggactgtgggataggggtccaatccggcgtcgctttgctctgctgcataatgctcggcgggggaacagacgttgtttcaggagagctgctctgcgcggctgtcttcgtcttggctggagtcacgctggcacgccgcgggacggagtcgctggttggcgtgcggttcacggcggaattcgaggagttggcctgattcttccgggaagcggccgcactcccactgagggggagatctttgcgtgactggaagttgcgtgggctgcggccacgaacgatgacggggcctgactgtacctcggagatggagatcttcgcacccgtggataaagtcgcgaccaccttgagtcggacgacgaagtgttgctgtagctcctttcggcgaccattgttggcggtcgcaacacggaattgtagacgtttccaagcgatagggaaggtagcatagtccgagtccagatcctgaccggccatgatgtccaagggaattgggggaggctccttctcgatcttagcgccagtgctagggttgttctcctcgggcgccgtgccagaattagcggccgccgctgagtgggtcttccatggcaccgagataatcttcaccgggtttccctccacagattcggtggctgatacggtgagttcctgggcgaggatgggaattcgatcgccttggtcggtcatgatatagcgcatcccgcgaggcaaagttaccgagccggtaatttggaacaaattgcgacgataacacgtcaactcggcaccttgttgcggcggggcattttccgaaggggatgttgtatagggggactcggcgagaaaaaacatcccatgtaactgggcggacaccgataaggatgttcggcgcatggaatagtcgaggagcgtaaagtgatacaccggtagcgaaaagcttagcagcttgttgttgtggtcgatcgatgagtcctggggttgttcctggggcgctgggtcaaagggcgccaccatctcggtgaaagggtcatcgtatgcggaagagaaacgcctcagttgatgtgccagagtaggaggcgcgaaggtagcgagatcctcactaatgtataccaaattagcccaaccatttcccagtcgggcggagtggatgatccacccctctcgtcccacttggagatcttatcacccacctaacaaaggtctcggaatcgaagttggaacggtgatcgggtagatccaggccggacatcgcattgagatagtcggtactctgcaaattccccagggacaatggactggccatgtatggtggcatcgccatagtgtcgaagccctccatggtaagaggtgcgatacggagacacacacccgtagacgatgcggggaaggaagaagtataggattgcctcttctatataaaggcagtcgaacgagagacagaggagaagaaggaagtagactaaagggaggaaatagacaagagaaagaggtgagacgaagataagccaaggacgagtaggcaagacctggggaatgctgcaagcaacggagcggaaagataggctaaggcgggagtgaaggcggagaggacatttgagacggaaatggaaaggtcagtggagagcgaggagagcgaggagagggaggagggcgaggtattagacggaggctatagaggaaagaaagaagagcaagtgaccagagccgggagaaagagagaggaatctcgacctgcacccaaacgatcaacggattcggggaatagtggagccgcggtttttgcggagaacgaacgcagcgctgagtcagtcaccttattatttgattttatagaaaaggttttattaatgtttaaatgtttaatgttttattcggaattcccttttgattaatcggtttaatcggttttggatacagagtacggagtaggacggagtatcgcaaacgctcatgaccaatggcaattaatatccaaatccctcagcaccgatggggtaagacttgatcgccggctctcggcaatcattccccccaggccctgaagatcaaggtgttctttttatatatgatcactcccaatatagcattcattgtccacggagtactccgtacagagtacatcttcggatactacaaggacaggtaactaactataacctgagattaaatccactttaatgcatacccacctgcctattaaggtactcctgcttcgggtcccccctcctgaaaacgccacatattaataatattatcattttcagtaactcactatccttggattaggataaggatgagtaatgatgcaccttgtctgtataggtttgactagattaatagttgtctatactcgcagtattccaatcaagccatgtacctccaattgtatcacttaatacgatcataatcgcctcaaggatgatcatcatcggccgtctgacatgcatctgtaggggccaacagccatccaatcagaatatgcggcgcattggatcagaaagcggtgccccccgtacggagtactctgctggaccctgtactttggctatgagcgccccactgaaaacggcaatgataatctgcaatctgcaatctgcaatctataatcggcaatgttatcatgcatgtaatacttagataagtacactccgtacttactccgtacggagtaatacttgtagatagtgcccaatctactccgtaccgtaagtacctgcacttttttgttttcttctctcgccatcgagatttaaataaaataaaatccattgtggaaggagatacaacatacagcctggtccaggggatgtcagacggtaagagagtggcgagagaaaaagagaagcttccgcgggtttcgcatgtgagccaatggagaagtctgtgcatttacccgattcgattattaccgaggcaattccttctaattcttcttccggcacgtttcccgatgcagcctacaaagtataccaaggttctgaccacgggagccatccacggacatgacgtcctcgttccaaggttctagccttcgaaggttcgaaggttccaaggttggaagctccagccctgggctttcaacggtgccgattaacctttgggtttgggcctgagatcccgaaaagcttcatacaatatgtactgtactccgtacctgaaagatctctctgcaatattccggggggtcggagaccagaaatgtagaccttcacaacataacagacttccagttcagtttcagccaaaaaaaaaaaagagagagagaagctccgcttgtacaaccgagggatttttgacgcaaacagaaaactaaattggtttgaaactctgagccaatgaaactcatttgcccgggtcaaagtttggacccaaggcctgaggaacccgtttgggggttcgattgttgggttgtatacggaggaggagtacggagtatagaaaattagaaaatatagaaaacacattgaagagagagaaatagtctctttatatacccattcccttctaacgtcacattggaaatgacaaagaccaagacacaatactccccaacacagaccttgttctttttttcttttacctaaagtgcgccaaagcggagttccgttcgaagccctaaaacccagaagatgtgcctgtgcgaaggacgtccaacggagctccggaccaatcagagctcggggcttaattgtgatgccttgggaaagctaaagggaattagaattaatctcaatttccccacaggttgaatgaaggaactgatagccgagtatatttgtatacatataaaatacatacagaatatcccaattgcagttctatctgtgtatgtggtcagagatgtatttgtttggaccagatgacgccaggactgactttctgtcctaccccggacctaactgcccaagaatcaaagatgtgtgaaaagaaactcctcggaagaaaccgttactggatcgggtgaaacaaagatggaggaaatggagaagaaacagaaaactggatagaatagatcccaaacccaatgcgatatggatatcataaacgcgaacagaaacgcaaagagaaagaaaagcagaatcgaaccaagttgatcaagagtcttctacgcgtgcatcatcgtccacgaagcggcgtcacagttcacttcctcaaaactatgtagcatagtgaagcccatcatcgagagattgtcgaagttgccgtcaccatcgacctattccagtgttagaagataaccggggaaaaggaacaagcccaaaaaaacatacacagtccataaccacggcatcggcactcagcttccggatctgcttgatagctagcaggaccaggccctgcattaccgtagagtaatgttcgccacaaggagaaatcaccggagacgaaatgcctccgacggaagcctgggtggcgcgcaacacgggcatgtgctccgccaaagcggatcgctcattgtaaatcacgatactcccgagtataaccccgtcggagggccgcttggcccggatgatcccgcaattaggcgccccgcccagagccatgcggtagatgtcggccacgccctgccgcgcatacgttttgatgtggtcgagaatcgcgggcgcaaagtcccagccatatacgagatcgtatgtgacctcggcattctgcagagtcgccgtgagcccctcgggcggcacccatgtcgacaggttgcgcatgatcacgctgcacactggtcgcgaaagcgccgtgttccaccccatgttcgcgaaccactgccgcagccgcttgcgctccacagggttgacggtcgggatgccaaggtagatccctggtaatcgggatcctagctggaagcgtttcatgccggtccgctggagcagagtccgaatcgcgcggctgtgaagggaatgtccgattgagagtttccttcgagatgggtctacgatcagacatgcaatcacaccggtgcccgtggatcgaaagaagtaggtcgcgcagaacccgtagagggcatgcgtgctactgttccggacaacaaaatgggcttcgtcgatatcctccttccggagcaagaagctgctagcggtagctccaagaagttctgacggctggcctagtgtacagtcgacacggatagtgtcgagcagggcatccagcgcgaaagagtcgcgatcctcgttccaattctcgacaagccagtgctgtcgagactgatgaatcttctgcgttcgcccaatggagccaggcagggccgctgaaggtgtcaagtcgccatacaagaccttgaccaatgcctggagggcagtttccgtgaagtcatacgtgcatatgtaagtaccaattgaggaatccatggcaaaatcatatggcgagctaactgccaccacaatcaatggtttcgcgcgacgttcgccagatggggtatactgcgattggcagatcatggcgacgtgttttgagaacccttgctggtagagattgcgattggcatcggccgtgacaactactacagcactcgctctttgaatgaggtcgtcgtggatgggacgcacgccattggaagtataggaggtgtgcaacacgcgcccgttcctctgccgcgagagtgatcgtccaagttctttgaagaccccctctccactcagaatcgaggaggttcgttccgagcataatggatccagtgacccacgcgcagactctgcgaccgagagagaaaccgctgatgttgggaggggcttgaccagcggcgtcagaagcaaaagttcttcgtctggctcgatgacattggacaatggaagtaaattattcttatctctcatcactgtgatggaagagttgtaggctcgggtggaaaggttggtatgcgagggttgcatctgcgtaagtgaagaaagccccggagggttcagtgcctgttcccacgaagtacaccgcgccttcaaatccaaaacgcggcgcaacgattgttcaatccgctgacggctgatgataccgttctccacgccgagtttcaacccgttgatagcttcctgttggacggggaatgaccgacataaaagcatgacgtcgcagccggcgttcttcgccatcactgtgccacctcctactccaatgttatgtgtgagcgcctccatctccaagcattcggaaacgaccaccccttgaaactggagatcctttctcaatagctcgttaaccacctgatcactcaggcacgcgtgcatcacgttcatcccagccgatgacaatgagacacctcccactatcatggcatccaggccctggttgatagcgttgcgaaagggcacaagcgcgttgagactgagttgctctagggattccgtaataattggaacatccgtcggggagccgagaaattccaaattaccataggacggaaagtgttttccacaagttactaaacctgcttcttgataccctttcatgaactggacaccatattgagacgcctcttggggatcgtcgccagcggtacgaacgcctaatggttgatttcgcacattggtcaaaacatccaaaacggggcccaatatccaattgaccccaacggccttgagctcctgtgctgtcgcgacagccacctcgtgcgctaatgacttggacccagtagctgcaatgcccatggtactagggaattggcggatatagatctcatcatacaaactgttgacgccaccattctcctgatccaaggcaattagtaacggaacaggatggcctgcatcacgcgcaatggtctgtaattccagaaccaatctagttgcatcctcggccgctgtaaacgtgtcagtgactgtctaagtagctagtgacaaagggcctttttaaagatacatttcaggtttttagcagatagcatcacggtacccaagtggtaattctcaatgagtgatcgaatctgtggattgacctcagtcccatcaaagcccatcataaagagctgacccatctgtctgtgccatgtcagcgtactccggtgtcaaatttcctaaagtggaaatagtctacatgacgctctccagattgacagttaggttccacattgaagggagataccccaacaggcagattttagggggggggaggaatggggcgagggttaacgccaataggggacgagccaagcgaaaacagtagatcgacatacctatctaggtcctcccagcccggggacagcatgccctctttccgggccatggcccgaggaggaatgcctgtagcggcccagagaggtaggatacagagggtgcagtgtcgggggatccaaggtgtggacaccgtaaacgtctgacgggtacggaatatgaagccagtgcacgcgtagtcaggtgacaagggagggttaaagggttgcaggagtcaaaattggacctcgggagctttgtctttctcccccggagccgcaaatgttggggaagagtcgggaccagagagataaggcgagagataaggagataggagcttagtattccccgctgaagggtcacgggatcttggcatttctattatgtacatagttatgtaagatttatattcagagcttggatattcagagcctatgacctgggaggtgtgaatataaagaacacgatttatagacatacatctacatagttatatagcgtagatgattgacacatgagaacatttcgatccactctgtatacacccgaagaaccgtcacgtgctttgtatgtaaccgtctccggatccattccccatcacgtgccatacataccaataccaataccaataccactgtcatacctgcaacggctacgacgctacaacgtccaaggttgcactgaacacgatattctccagcttcgtaccgacaccaccggatgcaactcctacacttcgcaatggaaccttcaaaccaccatgtgggctatggagctccatactccaatcacaacgcccacgtccttttttttccggcgtcatgtcactttgggcttgattgttgagccacatggaatacacccgagtggacattgataatcaacccgtggaatcggccgaatgaagtcaacggctatctgtccagggtgcggtagcccgcagacgtcaaccctctagttagataggggcaaccgtcttgcacgtggctttctatgcgacgttctttgctgtcactgtcgtacactccacccagactgtaacccataggattcctttaaccttatcgaatggtctcttttccttcctcttgatgccaactttctcctcttcctttcttcttctcccatactcctcagccctactccaatccaaagacccgtgacgtaattatgtgtgtgacttcttctgtgtgtcgccttctggttctatactaacctgcttctcgataggcgtgtcattatcagagaagatcctcgtgatgtgtctgtatacattgcagactacattatcagtaagccgcagccgagatcctcgatgcgcgaatgctgagactaactcttccaaggccgcatcaagttgtttagcccgacgcccgagcagccattcgtgcttggtctgcctactggcagcagccccgagctcatctacaagatcctcgtccagcgtcatcgcgccggcgagatctccttcaagaatgtcgtgactttcaacatggtaggcgcaaaaccaatcacggggaaaaacagcccactaacctcaaatacaggatgaatatgtcgggctgcctcgcgatcaccccgagtcctaccatagcttcatgtacaagcacttcttttcccacgtggacatcccaccgcagaacattaacatccttgacggcaacgcgaccgatcttgtagccgagtgtgcatcattcgaagcacggatcgcgcgctacggtggaatcgagctcttcctgggcggagtcggaccagacggccacatcgccttcaacgagccgggctcctcgctgaccagtcgcacgcgcgtcaagacactggcctacgacaccatcctggcaaactcccgcttcttcggcggtgacacggacaaggtaccccgcatggctatgactgtcggtattcaaaccatcatggattcccgcgaagtggtgattgtagccaccggagcgcacaaggctattgccgtgcagaagggcctcgaggaaggcgtgaatcacatgtggaccctctccgctctgcagctgcaccagcacccgctcgtcgtctgcgatcgcgacgccactctcgaactcaaggtcaagaccgtgcggtacttcgagtcgattgagcaggccggcaccgatgcccgcacccagggacccgctctcgtttaccgtcctcggacctacgtcccttcccctgtacaagttaagacgcccaagtcccagcagcctactcccgatggcactcccgaaaaggtgcccaaggacctccgcatcaacactgagctgcaccgccgcgcactggaggaagaggagctcaccccagatagcatgtcctcgcgcctggtcgactcggccattggcggtatcgacggtgcactgaaaggagaccttatgtttgaccgcatgggcaccagacttaccacactctgatgggaacacctctacacttttggcattttaattcggggtttttcttttttttaaaaaaaatctttttgtgagagaacaggaatatggattctgtctctacaaatcatatatgcatgggtctgttttactggtttggcttacaggaaccatgggtgttatttaaggagtttcgctggtcaattcgattattctcgacttgatagatgagatgcaatgcgttttctaggaatcagtgatatcaaacatttagctatgataatttaaagtgtgtacaattaatttaaattttcttgtttatgcgtatcattcaggatatatatactttaaaaagggcaccttgacggtgtagactttcagcgcggatatatggttatagatgctcgagtaatagattaaagatacagaaagaactagaatatgcttgtgtgtcgctcaaattgtatattctgtacattttattctccttgcttttgggtcgtactgcatgatatattaacattatagcttggcgaagacattgaccacagtaccgctcatatcaacaagagtgctcttgttctgcagccaagcctcaataccgcggcgaccattctccacgcccagaccgctcttcttccagccaccgacggccatctcagcagggctctcgccccacgtgttaacccaggtaataccagcctgcagctggtcaatgacgcggtgagcctggttcaaatccttagtgaagacaccagcagcgagaccgagttcagtggtgttggcgcgtcgcacggcttcctcgacggtgtcatagtacaggatggacataacgggaccgaagatctcctctttaacaattgtcatggagtcagtgcaatcggtgaagatggtcggctggacccagaaaccggcctgcagatccttgggcaccgagggcttctcgacaccgccacagagcagggtggcgcggtcagactcaataccgtggcgaatgtatgcaacgaccttgtcgtagtgggctttggagctgaggggaccgaagttggtctgctcgtcaaagagcgggccagcccgcacatattggatcttctcgagcaggctcttctcgaaagcagccttcatggtgcgcgggacgaagacccgggtgccgttggtgcagacctgacccgtgctgtagaagttggccatcatggcgccattgacggcgctttccagctcagcgtctgggcagacaatcaagggactcttgccgccgagctccattgtcacgtatttcatgttgcccgaagcagtgcctgcgaccttcataccggttgccacttggccggtgaaggagaccttggcgatgagtggatggccagtcagataggcgccgacatcgccggcaccgttgatcacattgaagacaccgtcgggaaggccggcctcggtatagatttctgcaagggtctgaccgtgaagcggggtgtattcactgggtttatagatcattgtgttaccggcggccaaacaagcagcagatttccagagggcactaaatatactagtcagcttttttttttctctgctgttgcaagcgcaggatcggggaaattacatttggatggggtagttccaggcaccaatgccggcacacacacccagaggggacttcttggtgtatacccaggcatcctcacgaagttgagtggtttcaccgttcagaccaccgccaccaatgaagttggcatagtactccaaaacatcggcgccagtcgtgacgtcgacggtactagtctcagtataagccttgccggagtccaaagtctcgacgcgcgcaatttcatcgttccgctcccgtagcagtgcagcggccttttggagaattcgggcgcgaccaatcagcggggtctgcgcccacgaggggaatgcgcgatgggcagcattaatagcggcatcaacgtccgcgttggaggcaatctggatgtcggccaacggagttgccgtggcgggattgatagtctggaatgacttgccggaggtcgctgcttggaccttaccgtcataatagagctgacgaggagggaaagagagcgacatgattgtgtatatgattttccagctatgtagaaagctacaatagaagataagagaggcggaaataacacacaccgccttagaattccacaaaagggaaaaagcggagctatgtaatcctttccggttttatgtactcggtactcggccgcatagcataactagtacgtaacagccaagtaccaagtacgccatccccgtcagcggctgacggtggctgaaacggcatcgtcctggcgcggggttgttatcttttggcctttgagcttcttcttgctctctccggttagaaagtccccgggaagttcatactaagaaaggcatttcttcgccagcgggaaagtcgacgtactctatctacggaatcgcgcatcggaagcgaattcctatcatggaccggcctcctcttttccccaatctgccgagattaactcgaatgcaggaagtatgccgataaagggctgatactcggctggtaagagtcggtggacctcattatccggctcatctcgacttctctccacttttagtgatcgccaccactcagagaccccaagattcgctgagtctgacggaaagaaaaaagaaaaaaaaaaaaaaaaaagcccgaaaaaaggtttggacgaagctgagcaatccttggagattggatcgaaaggttttatccgatcagaccaccctccgaacagtttggatatttctcttttagagaccgtcctttcttctccaatcttctccaaacattctcctcactatatcggtccttgcctattcccccggtattcaatatggccaccactaacgagctcctcgccgccgatgttaacagctacgactacatcgtcgttggcggcggtaccgccggctgtgtgattgcggctcgtctggccgagtacctcccgaacaagcgcactctggttattgagggaggtcctagtgatttcatggatgatcgcgttctgaacttgaaggaatggctcagtctgctcggaggcgagcttgactacgactacggtactactgagcaaccaatgggtaagaaacttatcttttctaaatttctaaaagagcttatgctgactatccccgaaggtaacagtaatatccgtcactcccgtgcaaaggtcctgggtggttgctctagccacaacactctcatctctttccgtcccttcgagtatgattgccgtcaatgggtgtccaaaggatgtaagggctgggactttgagacctttacccgcataattgataacctgcgcaacaccatccagccggtgcatgcccgccaccgtaaccagctgtgcaaggactggatccaggcctgctctagcgctatgaacatccccgtcattgagaacttcaacgatgacatccgcaagaccggtgagctgactgagggtgtcggcttctttaacatctcctacaaccccgatgacggccgccgcagcagcgccagtgtcgcttatatccaccccattctccgtggggatgagaagcgtcctaacttgaccattctcaccaacgcttgggttaacaagatcaacattgagggtgataccgtgaccggcgttgatgttactctccagtctggtgtcaagcacactctacgtgcccagaaggagaccattctgtgtgccggggctgtcgacacccctcgtctgatgctgctctccggtcttggtccgcgtgagcagctgtccgcactcggcattcccgtcgtgaaggatattcccggtgttggtgagaacctgctagaccaccccgagagcatcatcatgtgggagctcaacagccccgtggatcacaacatgaccaccatggactctgatgccggtatcttcttgcgccgcgagctgcccgacgccgccggattcgacggcaagatcgccgacgtgatgatgcactgctaccagattccgttcaccctgaacaccactcgcctcggttacgacgagcccctgaacgccttctgcatgacccccaacattccccgtccccgctcccgtggtcgtatcttcttgacctccgccgatccctccgtgaagccctcgttggacttccgctacttcaccgaccccgagggctacgatgccgccaccatcgtggcaggcctcaaggccgctcgtgagattgccaagcagtcccccttcaaggagtggatcaagcgtgaggttgcccccggccccaaggtgcagactgatgaagagctgtccgagtacggccgtcgtgtcgcccacaccgtgtaccatcccgctggtactaccaagatgggtaacgttctcaccgaccccatggcggttgtagaccccacactgaaggtccgcggcctgaagggcatccgtatcgccgatgccggtgtcttccctgacatgcctagcatcaatcctatgttgacggtcctggccattggtgaacgtgccgccgagctgattgctggcgaggccggttggtctcgcaaccagcctcgtctgtaaagtagggcttatgacgcgtcaaggacctgatatgtatgtaaaagttgtttctttagtttggtcttaatttggtgttattatagcataggagcgagcggcgcagggcgcggaggatcgcctttgaaggcatctttccgagtcttattctccccagcgtctgcgagacagacctggtatacaattggttatggatgaacttgatatccaagaataaatttcttatcacaatttttgaaattgaaaatctaaatattggaactgaagatggatttcatgttcaatgcaaaaccacctcaaaacgcctataaccaagatgaaagctatttaacatgacagcaatataaaaaaaccaagaaacagatcgcatctaagatcgaacaccttataccttcacagcgcccttatcagtatcgtggatcttagcacccagcttccatacctgatcgactgtcaaggtcggcccagtgaaggcatcctcactctcacccaatatgatgagatcggcatcagcaccgctttctaacgtccccttaacaccctccaagccaagcagacgtgccggcgcagcagtgacagcattgatcgccgcagccgtcgacgcacccgaccaacgacggaagttgttaacacactcgataagcgtcgctgaagatccagcaatcttatccgagccctccagcgtcaaccgcgcaccgcttttaacaatccgttccccattagtccactcatagacaccgtcaggcagaccacacagacgcatagcatcggtaaccaagatcaatccatccgggtgcgcattgtacgcgatcttgatggaagtgggatgcaaatggatgccgtcggcgatcactccgtaaaacggcctacggcgctcactctgtcccagcagaccgaagatacctgggttgcggtggtagaagggccgcatggcattgaacaggtgggtgaccatgcgggcacccttgtgcgtggctgcgacagcctgttcataggttgcatcggagtggccggtggagtagatgatgttgcgcttggtgatttcgggaatgtgggccatcatgttgccgacttcgggggcagctgtgatcatcttgattgggctggcgctgcccatgttctcttcgccatagcagtagatgatgtcgtcgaaggtttccgcggcgcgcagcacttcgggcttgtggataccgttgcggttagggctgatgaaggggccttcagcgtgtgcgcctagtgactcggcgccgtcttggggcttatgagttcctgctgtggggccgagggaggggaggacctgaaatatggattagtatttcttattctcttccctggatactttgcgctctgcttaccttccagtacacctcgggggtggagctcacgagcgtcggcaggtaagaagtgacaccggttcgggccaatcctcggtttaccatgcgcaaaccctcatcgtattcctccttcgtttcacagggtacggagaaatcaaagccatgagcaccgttcaactggacatcgatcatgcccggggcaatgatacggccaccgaggtcgatgatctcatcgggggacaggtgcaatccatagaaagcctcttgatccttgaggatctttccggtcagagagtcaatccatagatctcgctcgaccaagttcgagccgcacaccaggcgacaattggtgaacttggtaatgcgcggggtagaagtcttgcccggcattatgaatgttcttatcagatcagattaagttgggtagttcgagctcgagggaaagaatacacaagaagaagggggggaaacccaagtacataaagatctagacacaatgatgtaacagtagactgcgtgacattcggcatgccgatgtggtatacaacatagcccatagtaactgttatcgttgcttatcggccttatcgttacgtgtaatctcccgtacgtatcaatactcggcccgtaaattaccaaaaccggccttgacaataccgtcacggcccaactgctacactccgcatgcgggtcgtttcccttcccttctctttctcaatgcaacatctctcgtcgtcgcattgcaaagtggatgaacatgacatttcctattatattatgactcttttctaatttccctggtttgcgcttctccagatgactccatatttccatgtttccttatctcccttgacattgtcgcattgaaaatggttactaagatgaggcaaaccgggagactcggttaagttgcatattaatttatctactaaaagtccttagcttcgtcctagtcctcttcttatttagactttctcttggcaaagggattagctatctacattcttcaccattcttcaggctgtttctcacgtggcgaacattctttcggccccttggctcgcttgttgatcgctacagcttttttacccctgtagatctttgttctctacaaccatgactgagccggggaagcaaaaagctgagaagcacacggatttgccgacacatgcaatgtctgcgtccgtatctactccgcaggacccggagtcaggtgtggaccaggcagtgataggtcccgcttggatgtacaagccactattcaagattggcaaatgggaggcaccttactttgcctcacccgaaatgcaactatatttggtgtcatttgtctgcttcttatgtcccggcatgttcaatgccgttagcggtctcggtggcggcggtcaagtgaacacccacgatgtgaacaacgccaacactgcactatacagcactttcgcagtcgtcggcttcttcgccggctccattgccaatcgcattggtctaaggctcaccctctccgtcggcgggttcgggtactttctttatgttgcctcgctcctctcgtacaatatcaaccaaaatgcgggcttcctcattttcgccggagccctgctcggtgtatgtgctggtctgctgtggtgtgctcagggcgcggtcatgttgagttatccacatgagcatgagaagggaaagtacattgctatcttctgggtgattttcaatttgggtggtgtcatcggtagcttggtacgttcacttgcatatctcgaatcctcagaaacaatatattgatatccacagatccctctcggtcaaaatatgcactcgaccgccggcaacgtcaacaatggcacctacattgccttccttgttctaatggctattggtttcgttctctgctggtgtctcgtcgattgcaagtacgtcaagcgcaaggatggctcgcgtgttatcgtgatcaagaacccgacctggaagtccgagtttttgggtctttgggagacactgatccacgattcgtacatcgtcctgatgttccccatgtttctagccagcaactggttctacgcataccatttcaacgcagtcaatctcgcctatttcaatgttcgcactcgagccctaaacagtcttctgtactggctgatgcagatggtgggtgcgtttatcttcggcaagctgttggatttgaagggtctctcgcgtccgtggcgcgccaaaatcaactttggcattctgctcgctgttaccatgggcatctggggcggaggatacgcattccagaagcgctatacccgcgaaaccaagggtctcggcacggatttcaccgatcgcggctacattggacccatgttcctgtacatgttctacggattctacgacgccgcttttcagacctgcacttattggtacatgggttctctctccaacaatagccgcaagttggccaatttcgctggtttctacaagggaatccaatctgctggcgctgccggaatgtggaggtaagcaaccattgctctttttgctctattcttcactaactaacatactttcagcttggatgcaaatgagaccgcgtacatgaccgaatttgcctcttgctggggtattctggtcggtagtatgcttattgcctcacctgtgattttcctcaaggtcaaggacagcactgccgtcgaggacgatctgcgattctccgacgaaaccgccgccgacgtgcggggccataccaacgaaatgtctccgatagataagcctcacactgaaacccatacccctactgggactctccccgactctcacgaggagactaccaaataatgagttgtcggcgagggggacaacccttaccggtcatttatcaccactcggtcaatattcgatttgatcacctttatcactacagtgtgacgaaatacaatacctgcatttacgaggcgtgtgacttttttatgctcgcgaaaaaaatcctggccacaactgcgccagggaccgtgagtatcatgttcaacaaatactcaatctccgtcaactccgttttctttaataatcttgtacatgatctgcgttggatttctctgggtgcattggctcccattcgggttgtactttaggtctgccatggtcataggagtagtctatctaatgcgtacataatgtcatatctgcaaaccacaatgctattgaatatattatcaatatctaatcaggtctgctcacgacaactcaccaaacccagaagcctttgtagccgtaggcaacggtaccgaagcctgggtatgagtcgccgtcttagggccagtcgagccagaattctgcttcaccttgtcttctcccttggtcaattcccacccattcagagtacgattaaacagctgcaacgcagccaccggctgatagtacggcacctcatgaccagactcataaacacgggtgaaagagaagttaccatactccctcgtctcgccatactcgacaccatcgacgaggaagggcgcataaccggccttctggaactgcttgctgtgcttgtacttcgccgcgagggagatggcctcgccgccgaaccagttgcagatgtagtctgcgtcgccgtagatgagagcgacgcggacgggacgggagaggatatcctctaggtcttcgaggaagttgggccagacgaagtcgccggtttgctggaaggcgaagtagacttcgttgttggattgcgtgtagtttatgtcgacgcctagggcgttcaggaccgagtctttggcgaggtagtttatgtagtagccttctggggttgggtcgtcgctcgggtggcggatgtcataggcgcctcgctcgccgaagacgtagtaggggctctctagagttagggattgtgtcagttctgggtagattttatatggagtcggggtatatcataccgacgttatctcggcacatgttggttgcctcggtgcagagtgcgaggtcggatagcgaggtgcggtttgtaagcttgcaggttgcgatttggtcctggcagccgtttggcatttcgttggcgaatctcatgtagttgtaaactgtctcgttgacctgcattatttgttagtgtgaaattagtatcatggtaactttgaagacttacagccttgatcccataggtgttgttcacggcaaattcagggtagtgcctggcttgaattccttcatcgatgataccattgatgatacccaaggtgttgaagtcgagttgaatgccgtgctgggtgccgttggcaatcttaaggttctcttcatagaagtgatcgaagaactgccagtgttagaacttcaacaaaataggagctactggttgactcacggcagggccataatgccttgaagaagtcagcaaggatatatcaatatctcgaacagacgaactcaccctccatagctttcggtccacaaattgaaactcttcgacttgatcttcgaatccagcttgggcagaccacccaggaatccctgcaggacttcccaggtagctttggcagcgagtacagttgtatcaattgcggtagcgttgatgactggatagcgaccatcaattcctgcaaaggacgggtcttcatatgaacctgtgatagggttaagagtgccggccgctttctcagcgtaggagaaacctgtgattatattagccagatgacctagaaagagaatagaatagaaagatatccataccaacacccaatggctgagagatgaatagcaaattcgagacctcattccacgaattcttgttgatataagattcattattcttgttgacaccacacggacccaattcctcgaacaatccaatcaaagagtcactgcccggtccaccatttaaccacaaggtgattggcgcattttcagggtcatggcgagcctcgaaaaaccagaagaaagtgtgctctgtgggtgagaggtccacataacccgaataggagttgacaccgggggtagtttcacaaacaccctctttgccaggctctttatagcgaatggtgacattattagccgtcttgatagtcttgacgtgtgttggatgcttgggcagctggcgacggatgagggcctccaagccctccaagctatctgagggcacggcaagcgccgccacagccggtaataatggaatccagtgggagacacgcataatgggctatttgtttaccgttacgagtgaggattaccggggcgtgctcgggataacttatagtcccagaagaggggaagtaaacaagaatcgtgcatgataagcagctcacgcaatcgacgattggcagggaaagctgaatgctaagccgggtatttacttgatctccgtgggagctccggagaaggtagcatccccgttaagaggggaaaagagtcaaagctccaccaactcagggtgagaggttcagttattcgactaggttaggcggggagggaaaagatcgacggcgctagattataccctgtaggctgtgatcgaatagcaaaagaccagacatctccatgggctaatgccaagagctgttgggctccgagacaaggatgtcgtcttccgtaaagcaaactattatgacgtgctatgtttgatagtgtattaatgtgttgagaaagtagattgagtcatataaaggtggtattgtctgcactgcaggtggtaggtggtaggaataggcctcgaggaccgggttactagggttagtagaatccacctagctatgaacgtattgcggagagtgaaagagccaatttacctggcttgagtagagtgtcacagtaggctgtgttcacaataagcaatctatatagcttggccccatcactagcgaactcatctatcagatgccaaggcgtgttactccagagccagtcgttcttggataagtccgaaacaggctaatcgatagccttggggttttaaagttgacgaagcagaagtttatctgacgttttatatgccagatgggatagtttaaatacaagagtgcgatcaattcaagatgcagaagatgaggagagaggagaagtgggggaatatgtaaccggagttgaatgcaaaccaatcaaacaagcaaatgaaacaaatgaaacaaatgaagcaaacaaggcaaacaaggcaaattaaacaacaatccgtaccctattgatgatgacagtaaatgtaatcactccgtatatatatatatagttgtagttatgcatactaatatgattcgtatatatgattatgtatactccgtaaaaagccataaatataaagaactgttagaagcctgcatcagacaatcatattatactttaactagccaccggtttcaaaatggactgcttctagagttgccgatctcactcgagctagggttgccgataatttcctattattctctttctctaggactaaacacgaactgccccaatacccacatcctgccgagtctcgtatttgccgatttgccacgtttcacactcctaacaatctggatgtctactccgtactccgtacctagatagatgcctcacttggtagataactagaaccggaagaaccattgatgcgaaattaattggtctcagagttctaaagtttggtggtttgatttgattcatttcccgatgcattggtggatgataattggctggtttcatgtatcaagtgggaatgagtgggaatatgccgaataaagaccccctggctaccgcgtactaatactaacaagccccataatgaggacaaatagaattacgcagcaatttcctctcttctccgatacatctttgtcgaaaggggccatcagatcgtttatttcgctgggttacagtgtttcactggtgaaacatctccagacttcaatgttcccagagtaagtcagatccacttctattgattctctttctgatccgatataaagtagtaccttgcataatcacaccagccatcttcaccatgactaaacccgggctggttgcgattgtgattttataaatggataggggcattgcactatatcaagctcgaaaaattgtctaaagtgtgcatcctcgattgtatacttgggacgagtgttagatcaccatggactctatggagactcatgcgacgcccaaggatgctgagaatgagcaatcaatcactcagagaacatccagtccttacccatcccatcccattgcccagctccagggcccgtttgaggaatcaattgtggaaaccaccgatggttctgtaaataaatgggttgtggacatcgacgcgcaaacacggcggcgcgatctacttgagaatgacgaatacgagcggctttgtgggcgaaaatggcgccaaagggcatctgaaaagtgaaaactcatcctcctgtcaagcatgatcaaatcgaactaatccaaccatacagataccatccattctggaaattgatttcccaaatggtcttcggagttcatctcctggccaagagtctagcgaaatccgaagactcagtcatgagaattctacagaaacatgtggatgagttagatggctttctggaaaggaccactgaagactttatgatcgtccgactagacgttcgcactcgaattcagtatctcagagtaccgctaggaaatctcgatgtcttcgatgagatgctggaagaccggaatttccggctatcgattgtcgcctataacgatcagatcgaacattctattgagagattcaccctttccatcacggactcgctcaaagacctacaaaaggcgaaggaggctatgagtgcactatggttctacttccggaaacttacagacgaggattgcttcaagtccgagagcctcaagctttttcatcaggccatgatggacaacatggagggctggattgtcgctatctcaaaacttcgtcgacggggcactgctctccaaaaggccctgacccaacttggcttggcgactacagaaatgcaacgacgagtcggagtagcaagtagaaaggatgtggtgagttaggcttgattgggccttaagattctagcgctaactatcacagcgatcatttattaaacagaccagcaagaccgcaaatcgaaacaaatcaatcaaacaaagactgttcgataaaggacgccccaaatcagaaaaaccacttcctcgcgatccattatcgaagccaaagaggacatcaacggcttctaaacaggttgagaatccttctgctccagctagagctcaaaccgacactcctacggatctacccatcccgagcgatggcattcggcgcaggatcatgagtcgggctagatcatgcagtgctcttatagcagaagccagcgcaggcgccggcaccgaatcaccacctcccctcccatcaacatccggaaagctcaaacgcaagctctccaagcccttcctactcaaacgatccgccagcgtgaaaatcgacttgacccaaagtcgaccgaaaacagcaccatcacaaccctcacgactttcacgcaatatctccatagaacagctccgagcattctgctccacaccacgccctcaaaccggacaatctagagtcaaatcacccacacaagcgcgacaggaggcccacaaccaactcacgaatggccgagagaacatgaaggagcagatatcccaattcctcaagacggaccgcgtggtcgaagcatgggataacgtatccaagaacacatgctgtacactcccgattaccaagacaaaagactggcctagcagcgtcttccaagccaagtcttccaccctagaaaataagggcaacgacacaaacccggacctggacagacagatgtcttggatacaggggaaattcgacgtattacctacatactcattcaaaacaaaacctgacatgtcgccccggatccatgttctatcggtgcagatgacccatgacaacgctaatggggtgactgagcgagaggcgagtttggatttgaaaagtgaattcgggtcgagtattactgcgttgccggttgtaccgtcatccattccaccggttagttgataagagggttttcgatattcatggttgttgacattattatatagattgcactggagcatcgatctagattgattgactgtgctcaaggttgagtatatatgaaagtgtagtacattggacttatagagatatataattatagagaattaaagtgaatatgcatagccatgtgtattaataatataatatgtaactaactattcgtctttcgtatatataccacgtactccggattcgtatagtctcagccctgcccgactgcgccacaatggagattctttcacttttctttctctttctcttccttttttctttataaaacttcgaatacattcctcttcctctttctagtgatttcctttcttttacaaatataaaaaaagtaccaagtaccggtaccaatctgccccatacacaatagggcggccagccaagtcactgtaccttccccaaccccccagactgcagcctaaactgccaaggacccaccgctctcaccagcccccgttgacgtcgaacatctcacatcctttgggattcttacattcttctctttcggcttcagattcttcactttattacttctgtggtcgcaaataattagcccgtcatgccagccctatatcctcgatactggtaggtgctatgatgactcccgtcaagagacatatcactgatccgttacagctctggttactttggggataatgactgctattccacctgggactcttggggtcgctgggtagcgttcgccgtgatcgtcggtgtagccttcctaatcttcttcggtttcgcgtgagtcttacctaattctcttctatgcgatgtctcgcgattttaacaagcttgtcacagatgcttcaacgcacgccgtcgccgaaatcatggccaacgccctctcacaggaacgggatggatggctcctcctccgggccctcctccgccaaatcaacccatctaccagcaacccccatatggcgacccctactaccagcaaaatgcgccccctcaatacaccccgaaccctcagaactacggctactttggtgcgcaaaacgcaccaccacaacagcaaggcatcgagttgcagcagcctccgaatgcgtacactgccaacagtccccacggatatgcgccgcctcctggtccgccgcccaacggcaataaggactaaactctacatcattttaaagcttaatacgcatggctttgaaggtcttccgatattgcatgcctctcgatgaatttgccggaagttaatggtttacggcgtttttaactgcgaaatgtggtctttttttggatttggtcgcatacccacatgggtggatgtttttcctttactacttaatgcttcatgtcttccatgtcacatttaacccaagttcagctgaatttaagtatttggtttgcagcctgagatccctgaaacagcgggacttgagggttatagttctatgttctctcgtacatcgtttctctttaatatatcttggacggtcaaacttgaactgaactgaattagaattgctctttcaaagctaccggctctttttattgattcactgggacatcgtgtgattcgatcacgcggtttcggagcagaagaacagaaggtccaattgatacatggtttgagattggaccagttgaactcgctaatttaacaactcaattttcaattgtaaaccggtctcgcaatatattcagattgatatatttgatatagcgggctgattagtgccccaggcaccccatctccgccctccgccctatatcgggctccgctctgcgttttctcaatgcgacaacctctgagcccatggatatcgacgacattctcgcgtcagtggatcgcggtccaggcgccagcctggaatccgcagcgctagatcaccagctcctcacgcgcttctgggtagctgaacgcgccgtgtcggaggtactaccgtggccggcgccactgatggagcgcataatggatcgcgtgcggatacaggtacacagcaccttcacagcactccctaaatccaaatcactaatgaaaccaaatacctacagatcgaaacaatcgaagacctagccgcatcctcagaaacaaccccaacaaccggaaacacgcacaaccccaatctcaacctccgcctctcaatcctccaaaccgacctcgcccgcagtcaatacatagtacgcagtcttctgcgagccagactggccaaaataacaaaatacagcatgcactatctagtcctgctcgcctcgcgcaacaaaaaccccctcgcatcgcaaacacaatcaaccgcctcctcacagaacccgaaccagcagcccgaggactccgtgccggacatatcagagctgacggatcttgcgccgctgtcggagccggaatcgtcgttcctgcatgcgcaccagacgctcctggcgggccactatgcggggtcgttcatgggcgcgttcccgcggcagctgaggcggttggatgataatgccggtgggacgagtatgatccaggggccagagttgaaagaggttgtttttgttcggtgtcttggggtggaagttcctgttgttgttggaggggaggacgaggaatatgatacgggggttacgatgcgaatgggggatgtttgggttgtgagatgggaaggagttaaggcggcttggggaagaggggaggtggaattattgtgagtcctggagtcttctagactggtttgatattcaacttcatcatagcggagtggcgttatttgggttattttatgatatattttccctacttttgcgggacttgattcaacgatgtatgtatgtcctaccaaggcggtttccattggccgtgctagtaaatatcaaatactaaatcggatggttttctatagctatttcatttctttcaatcccctaaaagacgccaatcgctaagctcagagaaacgcaagcactccgaaagcagacacatataccgagatgcgaggacaccccagatcataaaatcataacaaaccagaaaagaagtagaccagatagaaggcagatgccatcaccgagatcgtatgacattatgcgacatacccgtaggtgggcggatcttcagagattcgctccaggtattcgcggtcaatcagactctcaatgcgacgcttgatcatgttcacgtctgggacaaagcgggcggaaagttgcgaaagagtctcgttcattagttgagcatgagtaagcgttttgcgttgtctgccagatattagttcgtcagatcatatacgaggattatgtgggagtcatacttcataatgcggacgatagcagcttcgatggtaccgttgcgctcgtcattcattttcttttcagtgatcttgcgctgatcttggttctcgactttgttggcaccgccgctgacaactccgatacgcactttcacaaaggggctgtggaaatcattgttgaaaaagaagcggtcagtgggcctcacatccttgctcataggctccttcttcaacactcgagtctttggggcaaccgcaagcgattgcaagttgcggatcaagtcgtggtcttgtatcagggtgcgagttttgatctcgtcataggtgaggccttcgccgtctgggatgtcgttgaataataacaagatgatcatggcgtatgttgacacgttgagttcatagcgctggacctttccattggtgcgtacaaaggtggttcgaagatcgccagtgcccatgctagcctgccacgacagtttgcggccactgtgcttgtcgagataaaatctctcaaagctttgcttcagtgtatcaatctcccgtgggaaaatgcaaggcaattggaccgttccctctttggctcccatgatttccattggccacatcgtactggtgaggacgttgatctccaggtccacgggtttctggtcaggatcaccactgcgcgcaatgtgctccttgtaattggtggtaaggtcttccgagatggtcatatccttgaacatggactcaatgcgttgagtaaactggttaccgacctctaacttcatcttcgaaatcatctgtctctctgcatccatgctgacagagcgtttcatcagaagacggcgtgatagatgtttcttataataagtttcaaatagatccttgtccttgatgtaccgcaacagtgtaattccgctgtctaggagaacgtctacctcgctttctgtctttcccttaatgcccttcttcaggttttcatcgaagaagagagataggtactcggaatttcgcgagttttggttgatgaagttggcgaagctcgccccaattgagccttgcatgccctggtccgaggcgaaggcattctcccaaatgtcatcgaatttccgcttgaggatgagaatgtcatcgacccagcggattgctgacactgtttgctgactctgaggcttttctttgtcttttcccttcgccggctttttctctttttcaccatctttctctgctgatggggctggggcttgtggtaagagtatagacgaagcattgatttctttgcccatttccacaattcgcttgctgaccatgtttgtcaaagcttgcttcttcttgtcgactcttttattaagcgtgtaaatattccgtaacccctccaactgatcgtgatccagcatttgccggacgccggtcccctcgaaattgacgacctcgtcaatattgttccggatgagctcctcgtcaagcaactcaaggaccttcggctctgtcgtgaccgccaacatataacggcatcgctcctcctcttcagtgattcgctgggttgcgaatcggcaaaacatggtagcatctcccatttccaagagccgttgcccttctgtccggtagaactccttacttgtttcgagaaaggctggttcaaactcagtcagataaagttttgagctctcctcctctgtaacagtttcgtagaggccctccaacatttggatgcaatgccgaatgagcggccgttcaataatgtgcccagaacgttccagttggatcatgaatagtatggtggattcgagtacatccatgacagtcaaatcagagccggcacggacgggagctcgtaggatatggtctcggaatagagccaagcaggcaacgtagatggatgggtgagtacggcttgccaccatacggtcctgcgcaaaaagttagcgcattgtatcaataccgtagagcgtgaaaaccccaccatatacatcagaacatcggtaaccatgcccatgcccaattgatgatcttcccaggcatccttcaggacggtgagaaacttctcccccgcctccctcctctcacttgactggtcctgcgcatcggtggatttttgcgcccgcacgagggtcgaagagattgaatcaataatgtgggttctgacattggttttcaaccagtcctgctctagttgtttgacttgttcgtaaagatcggaagcccgcatcatcaacacgatcttgtaggcatggcggtagagctcttcaaatgccagggttgaggcatttttagtattaatttcagtcaaggatgacgagaggactgtccagatagaatcgaaatcttcggtattggcatgggagactccctagaagtatagttagtgaatagcctcataagtttaaccccgcatggtcaacgaactctgcgaggagctcgaatcttgtgacgagccctcattgctgccatcttgaaggcaatgcagtaagtccaagagaaagtgagtgaatagagaacttaacaaaaaaaaaaaaggtgaagaaagaatgcgctcttctctccgcggaggccaaccccggaaattctaaagttccggctgtcactgaccgagcatcgtcatttcacctgtgctttttctttttctctcaagttttgtctgaagcttgcctgaatactttctctctgacttgcaaatatctctactatctttggacttatttctctgtcagctttcaaacacttatcaccatgcgccctttcaccccgggtctccgcccattgaatgcccttctgtcgcaagcacagtcatacactactgttgcgcgcatacaatcttcacgcttcctctcaacacaatctttctctctaaactcagctcgcccatcatctcttctcccccgctcgcagcgtatcttcctccaaacccaaatccgatacaactcccgcgctcctcaccctctcaccgaatcacccaagacacccaagagtcaggcggagcaggaggctgaatgggaagcgcggaaccaggagcgtcgcaaggatgaggaagcctatcgcattacattcacgtgtaagccgtgcggtcatcgctcttcccaccgcatgtccaagcaaggctaccatcgtgggactgtgcttatccaatgtcctgagtgtgactcgcgccatgtcatgagtgatcaccttggtgtcttctttgacaagaagacaactctggaagaccttttgaaagagaaaggtcagacattgacccacggccacacggagggcaacctggaattctgggaggatgggtctgtgaagagctatgacttggagggcaaggagatactgggagcaagcgatgagggtaagtcggcttgacttcattcgaagtgaggttcctgcatagattattggtggagtcggtgcatattaggtgttttgtttgtcttgttggatgtgtatattatggcgatgaaagactctctactcccagcatggcaggatccaagcatcgacgagaagaaggatatatattgggggctttgtacattaaaaatcactttgactgaattctcagtcaactcttaattttcaaggacaaccctatcttcaaagacgacatattgagaaaacataagattgtgtacagaagaaatcaaattgttctgagaaggtatatacaatgcaagtataaatgtagtaatccattccaccaaaacgcccagttttttgtatgccaataacaccatttcatgacacatgcaaatagatgtcaaatcctctaccaaccgcgtctctttccacggtgctccaagcccttctcacggcgcttgtctctcttccgctcgttcttcttcatcttatcacgtccgtgcttctcagggtcagcaacagcgtcgatgcgacgcttagcccgtcgtccttcacggcgttccttgatagccgcctggactctagatatatgctccacgtactcggtggtgccgagtttcttctggagaagatctaagacctcgtgacagttggagacgagggatttgtacgtgttctggaaggtctcgtccgaggagcgtggcgccgggatcgatggatccgtcagatgctgcaggggaatgagaataacgcgcagagaaggccggatctgctcaacctcgatgtggcggataagtgcggcaagaagtgtgatggaggctgtcttgggaatgagggcttctgctcgaccggagatagtttcccgtcgcaaaagggaggaaatctgcttgaaaatgtagtggatggcagatctgttgtattccaccttggcttcctcctttgcctctccttcagcttcactgccagcatcctcatcctcgtcctcatcttcggattcaacatcctcacctgccagctttggaagctcgagtccgttttgagaacagcaacgtccaaggaagacagtgttgcgtacactctgcatagcaagttcctcggcaatgcccggggtacgcagactgcgaagactggcgcgaagaagctgcagcatagctggcttgtctatggcgagaccggaacttccagtcaagggaagggaagcgtaacccgcagcggcatttgtcttggctagatcagccatccacaagcctacaaggttcgcagcacaggtcttgacccatgcgtgtgggaagaacaggcactcttggacagacgtccagatagaagcgcattgcgggctcagagcaagtgtggaagccgtcttgcaaagctttgtgaaaagttgcaaggcatagtaaagagcttcccaattgccattctcatgatcatctagaacgggctgcatcaagccagggaggattccgatgacaaatcgagcctgtttatctttctcggtctgctcggcctcgaagtagatgcgcatggcctgcaatccaatactgcataaagccatgttgtcagtctgctccaaccacgaccgaaggggagtaaggatagtcttcatctgctcccgatccgcacgattgaagaactctcctagcaatgtaccagccaactcgcggcattccggcgagtcgtcattcgccatagcaagaacgataggcaggaagaaggtgctaataatatcttgtgccaattctgggccggtctttgaaagaagcgcgtgcatcgcctccatgactgactgccgcccggactgatgcttgtaatccaggttctttgcgaagaaagggagctgtttggtccatcgactctttgcctgcgggtactcaatcagaaaatgaacataggttccgcgagcaagatcccgcgcagaccgagtttggtttgtcaccatcatggtcgcgatgttgtccataagctcatacatctccggaacgacgagtttccgggacatgactgcgcggatgaagttgaaagtcacaccttggcgatctggctcctcaatgtcggaagccagacgcttgagcaagtatgcgagatgtccgtcacgaagcttggtgtcctttcgttcacgcagcatggaagaaatcaatttcagggacgcttgtgccgcttcggagtttgtgctaggagactccttaacaagcttgactgcttcggtgaaatagacgtgtgagttctcgtcaatctccggtagcggaagcttgatgatcgtggatagtaaacggagagcagaaaccttcacttcctcttgagactgaacaagcgcatcaccaatgatgggaatgaagcccgacaagttagaagctgtcaacaacgaattgaacttgttgaggatagcacgaagcacatccagcgagaaccgggtcagcttgtaaacatgtgaagatgtcgtacccctgtgctcgccccgcttagctccttgcaatcggatcaagaaccgctcctcgtatctggtcttgggcacagctgggcccgcatctggagcattgtcccgataagcctctttgatgacctcgtaacagaagactaacatatcgcgactttcggcgtcagggtttctcagaagaccgatgccaatccttcgcatgagctcatcaagcttgttgacgagcttcgaattgagcttttcgcgtaggagtgcctggagaggcctaatcaggtttgacaagtggttgatagttgagatcttagccagaagctccatagagtcgtagctcttgctgctcttgacctcctgcattttactggtgtatccttcggcatccttttcttggccgactgtgccaaaggtatcatccatcacaaccgcaaccagttctttcaaacagtaatccaaatctccttgcttgaagtgatcggtggtggtcacaagcatagagtgaacggtgaatgagagaacgtgaagctgataacctcgagcgagcacattacggagttccttgaggatgtagccgaaataaacaggacccaaaaggagagcgagctcattgagtgttttccgtgcagtatcacgagaatcctgtgctttactcttgagggttgcgcagacatctagcaggactggcgggagacgaatagccagttcttcttcggggagaatcttgagaagcttgacagtggtaatcgaagccggcaggcgcatactcatttccttctcctgcttgtggtgaatgtacttggtcaggaaaggaatgaagtttgtggtaagctctgttgacaccttcgcaagagaaggaacagtcttggcgagggtgcacatgggcagctcgacaacatccatcttatcaatttcaccatcgatctggatttctgtccctctctttcggttcattgcactagacagcgcatcggacatgcggcctagcagtctgaggatgttcttctccttttcaggcttgcttgccatgtagctgcggtatctccgaaagtttgctcggaactgaccccattccaaccattcagagagaacgccaagggtcgcaacaccttcggcaatcaggttgtgggcgttttcatcagcagcatcctcgaagatgaaatgctcaatgaggggaatgaagatggtgcccagattcgtagcctgaatgctaccttgagctgcgtctgcagccagacgtcgcaatgcacgttgccggcggtgctgttggatgtggagaatgttggtgaagaaagaggcctcttcatcatcgccgacaagaagaacgtgcatgtcctgcacagcaggtctggtggggttgagtttgacgaagtagccaatgactgcgacaacttcagagcgaataagttcagacttctgtcggatgccgtattgcaaagaggggaacagaacatcattgatgagtgcctcaaagtctgcgtctggttctgtggacgctctgtcgatgaatcgtctcagaccgaaggaggcgctagatcggatagaaagctcatcttcatccctcagatggaaaagcatgttgtagagaagaggcttccactgcttcgcgctcagagtttgagacagttcgtcgctgactgttctgaaagcctgcagacgtctggcataatcgggttcgagtcttttagttgagcgagagtttagatctgcacacaagtcggcaacaatcttgaggttctcgtcgtgcgtagcaagagcaccaaaaactcgggccaatacttctctgttcgcgtcatccttgaagtagtcgaacatcgagcacaccgcatcaaatacttgttgcgcgagctcggcatcttccttggggtcccataagggcaaaaagtgttcgagaatcttcaacaaaccagacttggttctggggctaacacgatccgcgggctgacgaagcagatatgtcgtaattccgacaagactagcggtctctttggaagattcgacgcagggagcgatcaaggaaagagtattgactccggaataaagaacgggcttcgaggggcctctcttgagaagacgaccgaggtggaagagagcgtgctccaggtagggagagaggacttcggatttgatttgctcagctgggaagtcaggcatctcttcggtttcctgtaactttttgtccgtagactgcgcaactaacggaacgagaatctcatccaagataaagaccttgacttcatcgcgggcagattcgaccgcgagacagtcaatcaccttagtcaagaccttgtcattgtgctgcaccaagtagaacgttgaccttggaacagcggcccaagtggagaacaatcgtagaaggcccgaaacaccttgtgctgtctcaatagggaattgatccagtctgctgtcaatcatctccttgaagatgatacggacgtagggagtccaatcatgattcgggacaattgagaagaccaaattgagacagcgaatacactctgaacgaatactttggagcacaggcaagaggcgttcatctgggcgatcgctaccctcgttgtaaatcgcccggcatgctcgcaccaaacagtagacaaccacatccatcgtctgcgatgcaaattcggtcatgcgggtttgaagggtctcaaaaacagtatcgatcagcttaagcagacccagctgtcttcttggggttgtcaactcttcctggaaggcagtcggatcgcactcatcattgtctttgacaacatgaacgtttgcaagaggaccaaatgaaagctgcatgaaaagcccaaagtcgtgctctgaaaggtgcgagatagttcgaagaatagtctttcgtctgccagcttggccagcggccgctgaaccagccttagagatcattcgaccatagagtagtcgaaggacaacggggaggaggacaacgcggtgctcttgttgaattagactttcttcgtcgccgacatgcacgaacactgcaagctcatctttgaatctagcctcatctaagagattaagtaggttttcttgatacgggcgtacattcggatctttccaagtgaaaaggactttcagcgcatgcttctgcagatcagaattaccatggcacaggagtcccagaactgccgcatggacctcgggtgccttaaacaagacaatggggttgaggaactgcgcgaacaaagcaagcatcgacaatcgatctcggaatccccaacgcacttgcgcatcatcagtctcagtatcttcgaccttcggctcgccagttgcgggcgcgtcatcttggtcttcgcgcaatgcccaggacaaaaacaatggcacaatctggcgcgagcgtttctcagcaacgcccggtgcagcgttcaagacacgaagtgcatgggttcgcggggaagcgggaagtatgtttgcgactgtgtggtcttgtttgaattgttgagatagcacatgatacggatcctctgtgctcttggtatttgcggcgagtgttttttcaatcttggcgacattgtaacactggaagtggctcttgacgaaagagctttcgtcgtcttctgttggagtgtcgctggacgcttcggaatcccgctctgacagccactggatagacaaatcggacacaatcttctcaccctggggattttcgctaatggtctttaatgcagcagcagagtcatcccacaatggggccaacttcttcgagaacaatccgaagcaaaagtaagggaccagggtggccatccatctgcggtgagcaatttgggggtagagaatcgcaagtttgcggatatgcatagagatagttctcacggagtccattgtcagcgggctctcttcgacttggatggctaattccacgggcgaggggtcgtctttggcaaggcgaacaattaattcccgtagaatctgaagagataccagcctcagcctgtgcgatgggcttgccaggttcacaattaaatcttgagcaaaggcttccagggtgggatgttcgaggtctgcggattctgggagagaggaaatgaaagtaagagcaccctccaaaaagactggcaggcgagagaattttgtagcagtggcgatgattggtttcaagaggctcgagtcaagctctccaactttgttagcgagttcgacatacgtcttgaaaccttgaccaaggaaaaacactaggcccttcgtctcggcgttattgccttcagctgcaccatcttggaacgctgataggaggttactatgcaacttagagaccatcttggaaattgtagcagaatctgcaaacaaagagatagcggctggaagcttcaccagcgcattcaagaaggcttcatcttttgtggggtattccaatgaatcagtgatgcgggatttgaaggcatccgggcaggaaatgtagccaggttgcgagatctcggacgtgatgcaaccagcctcatgcaggcgtaacagggtgaaacaagtctcccactcggatttttgccatgatgaattaataaacttctggaaaggcgaaagaagcaagctctggaatcgctctgatccccactctgagaatgttgcgcagaagaataggaaatattttgaaagctggcctgtagacactaggtctataatagggcgaaggaaaggtagtaactcgtccatgggggacatttgaaaggcatatgcaacgctggtaaggatctgtaatatcgtttctgatgatacatcagatgcggacacctgctggaggagggacagttgaatctgatgaacgatcttccagttttggattctgacacccttgcgagtggtcacaagcaggaacattatacggcagcactccgagagattgagattcggggttgattttgaacgatcttcgatataacccttgattgtgtcgagaatgggaccgaaggtatcgggagtcgtggcgtggacaagactgacaatcagaccgaatataacttctgcaggatcattgtggttttcactagtcggcggcatctggcttagaacgcaactgaggatgtccatgccattggagtgaagcccgttattgactcccctgatagcatcggagaacatgttcatcaatccttccctgtagttctcggtatccttgttgtcgtcggcggccttcgagatatcgtcgaaaaggaacgagaccgcagtctcgaggggtgctttgttcttgtagtaaacaagaccggcctttctaataaggaacgacatcgactcagcggcgaacctcgccacaaatggcttttgtcgttcttttccgagatatggagtcattatacccagcagctgccgtaggtctggtaccaacagacgagaaaggaatttgaagatccatgcaagacaggtgaaactccattcaacgacctcaatatcgggatgtgttgccgcaacggacgacaccagtgtcactgccgtagcaaaatgtttttcgaacttgacacccaggtcccgagcaaattgcgcaagcaagctcaatagcggctccatagagagctggtctctcttctcgatgaattccaccaatagacccataatcttttcttcatgatacagaacttgcgcaaagctctcggaaagagggttgacacgccgtacaaattgtgtaaagttgtctgaaaggttcatctcgaaccagtgatcgagagccgctcggaaataagaagatgtttcgtcttcatcttcgccgaaactggcgcggcgcacgcggtggatcgggtcgattttgagcttggtgatgcgtgatgaaaagccctcgaatcggtggttctttgtggtttcggtgcctgtttttaggcgcctaacaggctttgattttgtgcctgtccccaccatcttgacgggtctgacgagcagcactgttcgtgagaaaggtactggctatttttttttggctgatccgcatggaatacaaaaaagttattcgggacgggatttatttattccgaggccgatatctacttacatcacgtgctgataaggtggcccaagctcctgctttcgagaaacccgaggtgttctatcctgcgcctagttgcatgtagtcgatctttggtggcagctttggacagttcgggtgtttgaaaaatcttatacttttcgggtcttttgtctgtccgtttccccccattttggctatcttttatcaaattatttcaacatcttcctgtaccgagtcgaccttccacaaagacagactcaaaaatggctcccaaatggtatgtatgtttaggtctgcatgtattccagtctctaaccaaatctatatgtagtattgtcattggcagcttaaacggtcagatacggcctttgttcagcaagttagccaagctgcagctaaaacaacatttctcctttgcgatcattcttggcgacctcttcggtgatgggtcaactgaagacgagctcactgatattaccgcattgctacaagggaacattactgtggcgtgcccaacctacttcacgcttggtaaccgaccacttccccctcaggtggtcgaaaagattgaagcaactgatgaagtgtgtcccaatttgttcttcctgggaaagcgaggaaccttgaagacaacagatggtatccgtattgtggccctcggtggaaccataggagaggcagagggtagatccaaacccgagagcaatgctagcggcaagttccaacccacatacagtgaatctgatgctcgtgcactgttcggcattcacaaaaccgacattcttatcaccaaccaatggccgaaggatgtccgtctaggatctaactgcgaggtctctggggataaggagactgtgccatccgaattgcaatgcattgctgatgtctgcgcgactctgaaaccccggtatcacttttctcggtcagacggtgctttcttcgagcgtgaacccttctttcacatgccagcagaggatgaaaatacctaccaactcactcggttcatctcattgcctactttcggctcgacaaaaaatgctatttatgcttttagcttggacccaacagcacctttcccaaccagtatccccacaggctccaccatttgcccttggtcggcggcgcaaagtagacgcaaaatgctcccaagccaaaatgaatcataccagcgctacgccccctccgacagagatagagacccagggcaccagcgccgacacaaagaacgcgcccctccgccaggcccggagaattgtttcttctgtctctcaaatcccaacattgccacccatctcatcacctcaatcggcaatgacagctacatcaccaccgccaaaggacctttgcccacaaccgacttcttcccttccctgggcttcccaggccatatgctcatcatcccctttgaacactgcccgaccatcgacctaatcttcgacccggccacccgagcttcgacatttgccgagatgcaacggtaccgcgaatccctgcaccaaatgctgaacgagcgttcaggaggcaagctgggtgctgtcacatgggaagtcagccgctcaaacggcatccacacacattggcaattcctgccgatgcccgtggagaagatccgctcacgccttgtggaaatggcattcaagaaggaagcctcgaacctagaatattcgacgttcaagaccgtgccaaaccccgatgaaatgcacaatcatcatatgatcgattatttccgagtcttcatttggacgcctgcgctcagcagtgaagccgaagccgaagccgataattggtcttcacctgagcacaaaggcgtttggaagactgaatctggagaagagaatgttattattatgaaaatcctgccagagacccggtttgatttgcaattcggtcgtcgggtcatgggcaaggtactctatttagatgaccgtattaactggagggattgtgtgcagaccgacgacgaggagacgaaagacgcggaggctttcaaggaggctttcaagaaacatgatttcgcgatggaggttgaggagtgaatgtgagatcagcaagtttcttctttattttccaggttcatatatgataaatgtgtggtatggtgatcaaggggtctttccagggggcgcgtcttcggaaagctcccttttcgtgtatagtacgatgaaatgtgacatgagttcaaaattgaagccaaaattcaagtttcacagatttttgcagattccacgcggaccacatataaggaatactcatattaatgcgttttcctatgctgtttcaagcactgagattctagcgatgcgaaactgctagactatgcccggatgctcgagatgctaaccttggaagatacctgcgcttttaaaaagcctaacgcttaatcaactgctttatcgtcaattactttagcaactacttaagcaaccaattaagcaaccgctgtagtaactgctttagtggttaattaaagaggatcgtcgtttcaagtctggtgaatgtgataggccgaaaggcgggggaaactatggggatgtgtcccttgttgaccctgtcagacctcatctcttggtgtttcagctatttccctcttctctccttcgtcgaggctcttcttccggccatttggcagtttcaatcatttccagagtctgcaactcatcgtttagtctttttttggatcctctagggtctcacacactctctctagtctttcttcgtcaatgtctcaatgttctattttggtaacttgctgcctgttcgatccaccctcttgaactagcatctattcactccatattcgctcatattgaatctattgtgtgacttcgcatctacttctacactcggacgcgccccgcctcttgatacctccgaccccgacacgcttgtacatctcattcgcgctacagttcacactagactacgtctagttttgaatacattggctgttcgcagccattggaaatcggatgattcccttatcgcattgcgcacccgctattcatttacaagatgagtccggcaaatattacactatgggctcgagataccgcgagtgatctcgcggcggttccaagcaccttctccagctgggacaaatgtatgaccaaatcgtactgcaagtgagttccctcgagggatatgctacctttgcgcatggtctgcattctgcatgatactaattaattggcgcaggtggcccgtcatcgttggtataatcgtcggttcgataattttactctccgtattagcttgcatcttcaattgtctctgttgcggctatcaaggttgcaagtgctgctgtagctgttgttgtccgtcaggcaggcgcaggaacaaaacgcctaaagactttgatgaccctcctttccaccagcaccagcctccgccagcaccaactccagtctatcaagcaccaccagccccgccctcatatcgtggtgcgcaacagactgcacatttcgacgcgcccaagtctccggccgcccatgttaatgaggacgccctgcctgaaatgcctacctgggctggtgccgttgacaagcatgttgaagattcgaatcattacgacgacgtcgaaatggagcctttgaatccgccgaacaggaatcagggtgccggtacacctggtgccgtttactctgaccattcacccaacccacccatgggtgcagccgcggccggatacagaggatttgggcctactgatccgcgtgtacgccggtcccccggcccacgagcagccttgaatcccgtccaagatccgtacgggcggcgctcgcccggtatatcaccatcagccccagcagctggctatggtgccgcggcctatgacccctacggttctcgctctccgacatcgcctgttgaagcaccagtccacaatccttacggccagcaacaataccaagattcctacgctatccactcctatggcgcaggaaatggctaccacgccgtaaccgccccctcgcccgtggctgcatacaggccgcacacgaactacagccccgtgccaatggccttctccccatcctcggagatagaccacgcggccgcgggcccaacatcaggcttccagcgccagccatcctttggctctagccagtatcccccaacatatacctcccagcctccataccgcggcttctcccccggtgcatcttctacgccccctcctgctttctcggctccttcaccttcagagtacactacctataacccccacgccaacaccatccccattcccgagcccgacaacaccagacctccgagtctgttgcagagcggtagaaagcctaccgtcaatgcttatggcaacttttgagtatgacccttgtcgatcgaggcggtttcatgaccagaacgttttttttttgttttctcttctaccttttttcgtttgataccattctgaggctttatttgtcttcgttcatcttttatacttacatgccatgaccttgggccaaatttgggcctagaattaaagatatttcctttctttcatcacttctcccacttgtactcttttgcatccacgggtcggctttgactcgttcgacgggtggcgggttttttgaaaaacaatgcgcatttttgcccagcagcatatgtcccccatgtgattcctcttgattgcggagcgaagcgaagcaattaaatcataacctcgtgtgtatgtcacgtgaccgttcttttctcctccaaaatcattagttagaatcaatgcagtgaagaagtgatgggctaactttggcagaataatccaaccggcagaatatatagactggcctaatctggctagacgataatttctattacgtgctgtaggctagttactcaagcggttactagagtggttagttacacgagttgaatgtttacgaaggacttgaagttatttgaatatttttttcattctcacaaaagaaaatcaaacatttgtgaactggttgtctcctccgattaccctttccagaccattaaaatctcacaaggaaacatatccagagagaaaaggcctgtaatacacaagcaattctcgttatgtacagctgtaagagtcgcactcgatgcaaagattacatcctcaagatcctcctcactaccccaatgacacggttcaaagggggatattatcgggacaatgcatgaaaatacaaatgctcctgaagaattcagccagtcaagggactggcgttgagcatcgagatgcaaatttggacagcgtggaatgatccacagaagaaagtgtgtacatagaaggaccaaatagtggattaaagggcgataatggtgtcaaaagaatgtccggagagaaaaggagatgccaaagtgtcggcagaatgttcgatgggaatcgtccttgggggtattgtcttcatgagacccatggaggtatgagaaaatggaaatcaggtgatggtaggccgggggcgtcttcgtgcgcattttcgggtttgaaagttgcggtgtcgtaagtagacatatgaaatgggactcagattcaaatgaggtcataggagtcaataacccagtatgatcctgggttgtgggcatagagagatgtggcgagaggccacgcaaggaaaatattgaagcaagaacccatgagttaaagagggtcagccaaggagaggacgataccaaaatgaggtatcaaagagatgaggaaaaaggtgaacagcgcggggtatgcagcatgccaacacgaatcagacgtcagcagaactgaggtggtcgagagaagagaagttgagggtaaaaaaaaaaaaagaaaagaaaaagccagcataaagcatcttggtatgcatcagccaaacaccacgctccaagtacaagacgacaaaaaaaaaaaaacaaagaaaagacataagacgcaagaaaatgcaaatcaccaagaaggaaaggtgagtcccttagtaggaaagcatgcgacggccaggggtccgaacaggcactgggctttgagaaaagggagagcttgggtagcggtttcgatcctcgccaagtcggcaacgtccggttgggctgtcctccatctggggtgattgttcaccaaaggcaaaagtctgggcgcggttcagcttggagcgctgcttgaccttgccaagtccacgctcgcaggcaaattcgtgctccttggcgctcatctcgacatagttctgagggaagcagaaagagcgatgttcagcgaagaacgagctgtatccaccatccagaatgtacatatcaggatatgacaggttagggtaagtatcaacattgatagcgcggtcgtggtgacgcaggtacttggccatgatgggagcccggtgggcagagtactcgcagtgcaagacaagcgcagtgcgagcctggggggcattgaagagttcacctgcgaggcgttccttgtcgttatagttcaatgcaccattgatatggccaccctcatactcatactcgaagcggcagtcaatgatgagaatgttatcgaaatgctcattgaattttccattcatgagttccagaagagtgctcttgtcgatgcgaggcagagagtccgcgcgatcctcagggatgaagtgaggcagcttcatgctgggcggactcgaaatgtcactgatggactggacgggtgtatttgtcgctaccttggcctctttatcggcaataacatctgctgggttctcaaacatgctcaatgatcgtcggcattgcttgcgaggacgcatcatcgagtgagcgggtttgcgaattgaacagggaacgggcgagccgctgctacgggcatgctggagggatggccgcatacggggcggcgccaggtgagtggaagaattgttgcgcgagattgaacgctcatgggggggcgaatccccaaacatatcttccagggaagtggacgtgctcagagtggtcttggccccggttccaaatcggaaggggggtgctttgctctctggtgccggccgggtcaatccaagctggaaagactgagccttgcttctagccagactcggacgcaggaagttaggtcgctttctgctgccaaataagaatccacattagcaaaactgtagttggtggctgaataacacgtgaacttactcagttgggcataaaggcgactccatgggcgactcttgaagagggcttggtagcggagacaccatgggtgattccataggactgcccccgggtgtcggcgactggatctcgatctctgctgtgacaaaaaatgcgggcttgtgaggcagaggcgacatatccatcaggtccatagccggagctggtgaagaagatgggagcggcggggtggtcatcacatcatctataaagtatcagtcaaacagtcgctaccccaccctgccattctcggcactgcttacctcgtccattgacctgaccaagcatactggccgtgaacaaagaccggcgtggtgtggccaactgaggactaaatatagagttagccgggctttgtccctttgaacctcatggaaggaccatggaccagctccacatacctctgatcaatgtggaaattctgagacaggtccgccgccagactggcagttggggatgatcctcgaatgggtttcaggttgaagtagtccgaagtagacttcttcatagacaattccttgaaattgaacgggttcccaccgaatccagacattgagcccaggggataagtggaggcctctgaacgaaagcaatggccaaacatgaccgacggaggctgcatcgcagcgagaggtgaagagtgttccatggccggtgacaaatcggacctggagccaaaagccgacgtagtacagtttctggcaaagcaaccggaacggattggaacaatggcaaatcaggccctgcgcaagatgtctaccccgtactaggtcctacaaactgaggttcaaagaaaaaattgtctcaatgcacgtctccacgtttgcaatttcaacgttatgggtccccacgatcgccgtgacaaccagtccgggaaaaaaaattcctaggtcccagaccctcaccaccaacggccagagttgtgctgtgttcaagacaactagatttagcgggccatggcaagatgtcgacgaggtaggtgaatatggattccagagggcgactatgtcggacgtgattggaggggtcgggggggtagctcgtgggtgctgcaggagggggaaagggttccaagaatatgatatggcttgtcggacgggaacaacaaaattgaatctcacgatgccgagtgaggaatgtcgcgagtagttaagaagaagaagagaaagtaggaacaaagacgatttgaagaaagaagccgtgaagctgaagggatgggcttgttgcaatgggcaacgcaggtggggaggatctccgaatgtacagagtattgagtaatactgcggctccgatattcatgtaatgaatattttaatattaaaaaagggtatactagaggtattgggggtaatcgacgtaatctgggagtaatcgaggtatgtatgggggtggaaaccgctagttccagagtacggaaaaagcccaaaaaagaattaaaatcagactaggacgaaagggaagtcaagaataaacctattaattgactaaaagagactggggaagactaagatcggtatgcaaaggcgagtaaccggagacagtaaaagatagacagtccccatgctctggctaggggccaaatactttttttcgtcgttgcccggggctcccttgccgcagcaacccagcgcctatcacagctcgtcgggttgctggtatagacgatgatgtctcgggtttagctttgtctcccctgctctatggaaggaggatttgtcttgctattacggagtagttatacggagtattacacggagtactattactatgtatgaccagggctacatataactagggctatatgtatgtagttctctcgtcccttcttacgttaaataactatccagtatccaccaaaaaacttttttttctctcccgtgtgtgtccgtcaccgtatgaaccacagttcagctgagaaaaaaaaaacggagccaaagagatcgagtctaatgcagaaaaatatccactttcctattctcgggagaaaatttaaagcttctgcaagtgatgggaagcaagtgatgaaggaagtaagggcgcgactacggagtacatacaattgaacggcttcttttttattgcgttgcactttaacctcacgatatgcttcgaaatccaaaatgctgagaaatgtggtctggaaattagctccattcacaattatagtgcaatatagtgctcgattgactcaactagtgcgataagaagccctcttacccgaggtattgattggcccataccggagcgtgtaaatcttaaagatctcgtcttcgcaatgtgaaaagagttgatcctatctcagccctattaggggatatcaagagccgatctgagctggaatctgtctcctgtacgtcgtacggggtatgtacaatgcggcatcttgcacgggagtgtcaattgccgttgaattgtcgaattgcttcgagatcggagcgtccaacgtagtatcgtgtaaggaatggtagataatctcattctcctctggaaagcgaagacgccatacccgtgctgcccttacttgtaccggcattcttgttgatcaagggttcacgatggcttccaatgtcgcgcatcccttccatcccccttggtaggatgtttgacttcaatatacattaattgcctaagggtagttcgattggagtcccgctgaatggcattcaccgcgctttttgcaacttgacaatgaatgcgattgtatctgtattgccctcgctccggaattagggctaatactcgcatcaaggacaagccgggatcacgatttatgcgattgacacaacaaaccaccggtgaagaacctggtacggtcaacaaccttaaacaagtttatcagtatagatctcctccatcggtcctattcaggctatcagatgcgatatttacaaggtatactccgcactcaatctctcaattcgccaccatccacaggcttatactttgaacaaagtctgcggagtgtgttctacggggtgtgaaactgctaatcggctatagtcgtcaggtcatggtggacactcggctgatgatttcattactttattctggtattctagaccctctcgtgaaacaccggaacctcgggcttccctgttcatggtatgtcccgtcaatccgagatgcatcaacccccaatccgttgaatattaacaattggctgtcctcgctgttatatagcacttggtgcaggcatcttacacaaatccccctgtggcagacgatgcggtgtgctccccgacgctgttcggaagattgtattgcccaggtggcccgtgatactacgtcatatcgactgcacatctatctatttgcgtcccgtgcacagcttgcaaacctgatatcctaatttaagcttggaagtcgaggactaagccgatcttgaaaccttgggaagtgtctcgggtcgcgtcgacgcttgtttgggggtgttttggtctactccgtattgaccacaacactggaatatgcacgaattagcaagcatccactttccaggcgcttacagatgcaagactctcataacatgctagccatgtcagcccaagtgccccgatctgagtatgtatctgcgccacgcctgcagtcatagctaaggtggggtcggagaggaccgcccgatgatgtgaccggtcaattgcatcacaacgccatgtgcgatggagccagtcatgtcagttctccagccgactgactttcgctgctgcggggtccgtcacatctcacctcgtgtcctgctaaacataacctgcatggagagatggatagggttgtctagacctttttcccctccttgtccaagaatactccccctcttcccgaccaatgtgatgtcacgatcgtgttgattgttgatagcgcgtgcagatgaaggtaaacaaagcaaaccagattccaagctaatgcgatatcccgtgatcgcacatgacatcaaagggaaacttgcccagatcaggatttccgacctctctcaactgggattcgatgtgtattttggtatattatacctctagtaagacatacagagtactggaaatacacttaccctacatttcccctgggcttttctatatttgttaattattattctcccgtcccggggaccccgatctgcgccgctattggtatcctttatccgcctcatcggcttcgtgcctgtcagctcccctctctcaaatcgtgctatcacttttctagtgacgccctactccctattgggctcgtatcacatagctccgatcgtggctgtctctgtggaatgcacccgcccaacgtgatagatcgagaggcctagacgccgctggactggtatattcgacagccataagttggattgtactggtttagactttgtctcgtggcatcgaatagcctcttttggtcaattattatgctcttttatgctcttaatactgcatccagacctcaagctaaaccccgtagccacccccgtctttacttaaaccccgtgtacactccccaatatcccaggactccgccagattccactctgaacctccgaacaacctcccaagtcacacagacccaaataatagggtcccggttgcatcaggcaacccccctgaacgcgcaaaatctgacacccgactctacatctatcacaccggttgccagggactcccaggcccaccacgacgtcggactccgtacaccatcaccccgagacccatccgcctacatcaaaaccacctgcgtgattcccacgaaatgaattccacatgttaccaagcacgactaactaacctaattctaaaaaaactacttgaaccatgcagatccacggtagacgatcgctcatccgttccaacacatcgattctgatacagaggtaattttctcccgactccttaatatggattctctcagatgtcgaatggtcccgcccaagccaaattgatagctcgatgcacggttcctggtttcactctctctctatcgcccgacagcccaggaatgttgctctgtccggtcatactcgtatacagatcagcccgggcgggtcggtgcatccgcgaaggcagcaccaagcggagcccggatagtgaagctcggatctagcgcaattagcgggttttcctcggcgacatgcgattgtataaatggatgctgatttcccggttgcctttgacaacaggatagctttgcgtctggactggtgtggtttgaggttgatagcccggctagcacttgggtgatctcgtttttgggacgtcattacccctgaatcagtctggacttctttttgatcccggttgccctgacagcttcgaatacaccgtgttattttatctactgaaacgttggttgcatgttcccatgtccgatctgttgtgtggtatttgaggtatctttgatgcggcttccaggggctacattggagaggtacggaccactccggcttacttggagattgtcttgagggtttgggggctagattgtcttggcttggatcgtaagctgggtagcgtttgactttgtggtttggatctgcctccagaatgctgtcagcaaatattgcttgttggaggccttggagtcttactgagaatagtcacatgctctaatatatatgtgcctggaccttccatatagcttcgcaccacacttggtttcctaacgcggccaacaaatcatgagctccagaaatcctcccgaagattctagaaaatatccacattgaatgaggtcgattgcccgttcaaccccaggctctttggagcatcgaaattcttatcggcttatcggtctaggctagtcctaaataggctaaagcatgaatttttctgagcgacttgaacggccgcaaggagtgttcaacgtgcctttggtttgcagatcttcattatccaaggcctgagagcggataatccaattgttaattcaacctcgcatctatccgctatccccaaaccccccagactcagcaatgggcccccccttcgccggttcaaagaagcgccgccgtgaacctcacaatgtcgacgtgaagctggtggaactctacgaggatctcgctagcgaaaaagatgatatccgactcaaggctgctcaagccctagtgtcgcaattcactccggaccagaaccctgccgatgaacagatcaagaaggtgctgtcgagactcttccgcggtctctgcagtagccgcaaagctgctcgaatcggattctccattgccttgacagagattctgagtcaggtattctcgtcgccgagggagacatcacgctttggcttctcggatgctctgaacctttgggagtctcagtcgagttcctacggcagcgagtcgggacaggttagtggacacacatgagttaaaacgtcgcatgcgctaactaggattcgttccatataggagcaacgcgatcaccttttcggtcgtcttttcggcgctgaagcgatcataaaatcctccgttctgttccagcccaccgtgcccttcgagcaatggactcaggtcgtcgatttggttttcgaactcgcacaaaagaagccatggattcgcgaagagtgtgggtggattatctaccagtgtgtctacgacctggccgcgcgcaagatggaacccaagtacgtccagtctgcgctggaacagctctgcttgcgcgacctcgcccggtcgcccgagggtgttgctatctggttggcggcgaaggatctgttccccgatgctactttcccgagcaagatctggaagcatgacgatcccctggatacgaaggagcgcagcagcatgtcgaagatcatgaaggaatcgggtgctgcgcccagcgagggcgagaccaaggtgaacactgcgaagtcctctggcgtctggaataacaagcttcacttcgcctgggatgcggttctctctcggaccagtgttgaggcgaaggataagtcgaagaagtctcgtatgaccttcgctgatttttggacagaggttgtggacagtgagtacctatctagcggtggaattctgctcaaggcacatggaactgacaaaaagtctctttacagatggattgttcgctgctgcgtcctcggacgagcgtaaatactggggcttccttcttttcaacagaattctcaacgatggcgggtcgcagcaggcctctcagattttcaccaagaaccttatgcgatgcttaacgaaccagcttgctgtggaggaccggtacttacaccgaatggccgctaaggtggccaaggcaatccaggcccgtgtgtccaaagagcctgaattcgcagctgcggccatccgtggattgatgggaaccagcggcaccctgaacttcgaccaggctacaaagaccaagactgtggaaaagattgttgccgaagccaaccacgaggcattggaagagattgtcccgttcttcgaacaacttattcaaaatcccggcaccaccgaggagaaaaccgccgcatccaaccgtcaattcgtcgctggtctccttttgtcaattgttcgctccaaggcttctgccgacgaagacgatgccgaagacctccaagcaagccttgagcagatcctgtctatattcgtgcgctttgcgtactttatggatgccggcaagggatccactgcccctgagcctcctctgtcatcggcgacacaagaactcctgcgcaatcgaatcaactcctgcttgaacagccttatttccaaccaaaagttcgccgctaccctcccgtatgctgtggtgaagcagattcgcgatgcagccaagtctggcgaattcggcaagttcatcatcgccatcgatgagaagctgtcggaatctgtgaaggctgctttcaaatctctaaagaagttgtccagcagggtatgatttctccccttatcagcttttagctacttgtactgaccatcacataggagaagaaggagaagggcatggccgcattcaagctgctttactctatgactatcatgcaggtgtacaacggagacgcagacgctgtatccatgcttgatgagctggagttctgttataccaagttcttgggcgacaaggaaactaagacagaagacgccggcgatgcctcggatgcgttagttgagatccttctcagtttcgcatccaagcaatcgcagctgttccgtcgtatgagtgagcaggtgtttggcgcattcgctaaccagatcaccgagaacggattggaatctttgacctcggtatgtcgcctcaatttctatgagatatgcattttctaactagacctagattctggaggccaaggagagtctcgctggacagcaagagatgtttgaagagcaagacgatgaaggcgtggaggaaggagaagatgacgaggatgagatggatatcgacgaggatgagctcgacagcgatgtcgaggttgtcgaagccggcggctccggctccgacgatgacgatgacgatgacgacgaggaagaagaagacaacgaagaagatgcaaaggaagtcgccgccttcgaagccaaattagccgcagctctcggcacacaccgcgcagacgaagacgagtccgattccgacgccgacatgaacgacgacgagatggacgagctagacgaaaaactggtgcaagtattccgcgcgcgtcgtcaagaaacatcccaccgcaaagacaagaaagatgcacgtgagaacatggtgaacttcaagaaccgcgtcctggacctactagagatcttcgtgaagaagagccacacccgcccgctcgcgctagatgtcctcctgccgttgctccgactatctcgccggaccaacgtgaagcagatcgccaccaaggccaacggagtgctgcgcgagtacacaaaggtgtgcaagggcaattcgctcccgaagatcgaggacgaggcacaggccgaggcgctctgggagctgcttcggtctgttcataatgaggctagccacagtggccctatgggccatgcgactgcttgcagccaggctagtttgcttgttactaaagtgcttgttgcacatgataaggatgctattgcccgtgttgtggatgtttatgctgccactcgcaaggatcaactcatgagcactaagtgtcatgtgcagccgtcgttcttttcggagtggaataactggtgtgtttctgcgagcaagcagttgaagtgatgatgggttgttttatatagagattgcgagttatgatctgtcgctggacttcatgtcaatattattatcaggttcattcaacctgtctatatagtccacctctctctctaccttcctttaaaccctcctcctgtaaacgacgaagctaagtcccggcggtgagaagataacgttgatatatatcactgaaggtcatactgcgcgggtatagggataattatgaaatagtgagggtagtagatagaatatatataataggcctcgcggttccaaagcgagcctatatgaattattagtttataatgcattatcctgcagctgtatgttatcctcatcacaacgaattatagaaaactcccctaaaagccagtaatatatcgatgctcattcgtctcttccaaaacctccaacctcatcccaacctcaatagccccctcattacgcggcgcactcaacataccaaaacaaggcttatacctaatcccctcatccaccctacggtacgaaacaagtgtatcccacggctccttcttattcttgagcgccgtatctggatcaacattaggcacctggcagcgcgcacagcgagccacaatatccaggtcaagcggagactgaataacagcctctccgctaccagcggaaccaataaaagtaccgctagcatttcgaccagtaatgcgaaccaacttccacgaatcctcactccacggcgccccgccgcgaacaacgatattcggacggaaccgctcgacagtaatcgggtcgacgcccacccttaccagacgaacattgagctctgccagcgaagcctccgacgcaatcaacaccggatgcacgtccgcaaagccggttgtttggacgcggcctaggtagcggggggcgccgttacccttcagcacgcgcggagccgggcccttgtagacgagagcgacgtcgcggcgcaggaaagcagagaagggagcgttgatttccttgttgtacctgtacccgtctgtctctgtgtcccagatgtggacggggcccgtatttgtatttgccgctagccattgcggtgatggatgggaagggatgcggatggtatgaaaatgatggtcttggccttggtattggctgggtttgttgatttcgggtttcggtatactcacgaccaactcgtcgccgtcggcacttatcgcggtgcgaatgcgggtcatgtcggggatttggcggatggttagaaacgtatttgaggatgcgtcaatgagcatccagcggcggtcaaggtcaagaccatgctgtttaaggaccgttgattggacttctaggcctctacaggattttatggggtacatgcgcagcgagacgatttcgctggattgtttggggcgctggcgccataggcggagaagtttggtaggggattggactgatttgggccatcctttgaagcgcggaatcaggatgattggaattaggagcagaaggcctaatatcactgctgacaccatgttgtgcgactgaagcatgctatttgggaagggtatacaattacaggccaccgaggtgagaagtcggttttgccaaggggggccgccttatgatgtacggcatattcaggccacagagagatatgtggtactttcagtttgctgtcatactgttctgtcgatatgttgtgccttatcgattattgtatatggtatttgctttaggtccaataatagaactcggaagtatgaattagacaaaaggtaagtacttgagacatgccacatatgaacaccacgtataaatgcaataaatgagagggaaagaaaccggaaatgcacgtataagtccaggagaagcaactgctgaagcgaaccagatattacagggggcaaaaagaacaacatgtacctaggtcgacctcattaaggggtatatgcccaagacacagctgactgcgatgccgcaatctcgttatgccgaacccttcttatcaaaccaacacgcgaccattgccttaattaaggcgagtgcgacaacccggccctgctcaatattcgcatcctcagacgccccagggacatggaggaataggacattgcggtcctggccttgtaattgggccaaagacatgctggtatagaagatgaagtcgcacaagtagtgacccgcgtcattggaaatccgaagatccgaatcgggagcaaacgagcgccacgtctccaggaactggtcatcgggctgataaggtgaagcagaggaggggtcatctgtagcacgacctggggtcagaatcggtggcagacccaaacctttccattgtttttcgccgtccacatagccggggcgaccgtcgacatctgtgatgttatagtcatctcggtgagctagaatttcgacggagtaatattgccgcggagctgcgatgccgatatgaataatgagatcaggtctgcaaccaccatgagaggcagcaaactcctccagaatcaagggaagagtctctcgaacggtggcatatgccactgggatcggagtgggatgcacatggagtgagactcgacgcgggcctgagtcttggtctttgggtgacggaaaaaggaaagatgatggaagagaggaggcgaccagatatgatgcatttacaaggttggtcttgaagggctggttacactgttagtttcggattaccagcatccgaagtgcagatcacttaccccaaagcctgttatcaggacggatatctcattaaccgaagccgagggccgtggcgggctgttatcgacaggagtggaggatatatatggggcagcagtaccgtagtcacccatgatcacggttattctcgaggtgaagttgagaagaagatgacttttgtgcggggaagttaaaccttggatggccagacgaatgcgggggtcttggcgggatgcaacccatggattctactaacctaattctgttaagctatatataagtgcccaggtggcggccagttagggcttcatgttttaggcttattatgttgtatgttgtaggttggctagtttaccttttcaacaaaaagtaacaaaaagaaaatctcggatgggttaccgagacttcttctccttgtaccacggagtacagagctggtttctcctctaactattccaccgtttaactcgcagaatttgcaggcttctatcattggcacgcttatagattgaaaaccatctgcatatgcaagtggatccaggcggaatagaaaccccggtcaagaattgcctgttcgggtaaggatcgcttaatttggctctcgttctcgcattccaggttaggtttggagtatacccatcaatgtgagctaagaatatgactccggagctttgacatttgggtgaaaggagttggtcagcttagattttattggacctgtagatttccaatgttgcttggctttggctcggttcggttcagcttgacaacttgatacctacgtgggtcccccctggttcgaatatccagtccaagatcgggttgggaggaaaacggagtctcccttactggcggatggctcgggaactattataaatgagaaggtcctcggagaatatcagtttctagaaatctggggtgtcgcttctattgctgtccccttccccccttttcagtcttgaccttgactatggcagtcatcactgaattgctcaacagtccctatgtcgtacagagtgtatgcattgccctagtggcggtgtttataacgagcttttgggcagatatagcaaacgagattccccatagacacattcctctagttggaaaaacctggtgggagcttaccaacaaaaaggcccggcaacgctttactcggtcatctcgccaactaattaccgaaggatttgccaaggtgagtcctaagagaaatagatgacagcattatctactctcaaatatgttaataggcctttgcagggagcaaatgtctttcagatcatcggagccacaaacccgatagttgtattgcatccgaagtttgtcgatgaaatcaagaaccacccagatctcagttttgaagactccatcaaaaaggcaggttatgaaaccggaaataatccctgaccttggctaacttgtgaatagacattttttgataatcgcattcctgggtttgaaccatttcataatggcacctctttgaaagctaccgtggagattgtgcggaccagtttgacccaggcgctcggtatgcatgtttgcatctatctcacccgagagacatgattgacttatttaaacagggtccatctcacttcggctctcaaaagagacaggcgcgatattgaaggaatccttgcccgccaccgatggtatgccgacgcaccccatttgcaaccctcttactgacgcttcctctcttggtagaatggaagccctactacctcgcgcataagattccgtacatggtagctcgcctctcctctctgatatttgtcggagaaaccatctctcacgatgatgagtggatcgatgtttccgttaactatgccattgatgcgtttatggctatgcgcgatctacgagaatggccatctattctccatccggtcgtacactggttcttgccctctacccgaaagctacgcacgcacttgggaatggctcgctccattataaaccgcgagatagacaggcgggcattgattcgcgcgggcaagctcccagcagacgatccacctcgtgggcctgatgctctggactggtttcgcgagaccgccgaaatccgtaataacttgacctttgaccagtcttgtgcgcaggttggattggcgctggcggccattcataccacatctaacttgttaactaacgtcatgtatgacctcgcggcgtacccggagtatatccagccgctgcgtgatgagattttagcggttgctgccgaagatggagttctgaagaagacgagtttgctcaagttgaagttgatggacagtgtgatgaaggaatcgcagcgtactaatccactctcattgagtaagtcatccaggttctttcgatcctctttcgatttaaacctcttattgacaccccaatagcttccatgaatcgcctcgccctcaagcaaattgtgctctccgatggaactgtgattcctaaaggtgccaacatgttcgtctctacgaaaaccctggaagatgacaacatctaccctaatgctggcacttatgatggttaccggttttacaacaaacgccagcagcccggcaacgaacacaagcatcagtttgtcgcgacgacaagtgagcacttcgtcttcggccatggtgttcacgcctgccctggtcgattctttgctgccaatgaaaccaagattatgttccttcatttgctcctgaagtacgattggaaactgcagagcggcggtcgacctccgaacattgagaatggtgtcgaatctatcaccgacccacgagttcagattttgtttcggtcgcgtgagtcggaggttgacctaagtttcctaggagagtgagtattgggtggatgtaagcagcgcattgttttccctttttgttctatacatattggatatcgctaggttttctgatttaatcaccatggaaatgatgttacttataagcggtgggacaagctagattatcgaatgtccaatgtccccatttgaatattatcgagtcatttgaaaaaggtcaagtccaagtcttcgaggtgaccaggcaagactcggctcctcgaaagtggagatgattggcatctggcccacagttctgcgggtattgtggctatccattgtaagcgagatgagatcttgttactaaattgggaatggatctctgaatcggagaatttaggaacattcacagatctcaatgaatgctcaacggggcataaatcacacatatacgccgtggcagtgatatcaaggaagtcgagggtctcgtttagggttcaaatatcgacagaaataccacgtgacaggtaagtatacagtatatatacggtaattttcaacaacgtgtgttggacgcgtcgcgcgtcagtggggaaggctgaacgtgaagcttctccaaccgcagcgcctccaccaactctccccccaatagggttatatgggtcttttggcttgtctctttcgttgggtcgctcgggctccagggccccagaccgcacaatgagaaattgtgaccgctgatctacggtacccaggtacccgtaccaagatggttcggcttttctttgaaggcgacaaaccaattcactctgaaaggagacaaaagagaaaggattcttacttttcaaggcccgagcgactctaagcatgattggaagtcaaaaaagaaagaaaaatgagctgaaaggtatcagtgcagacgaccatcagctgcacttctatacgcaggctggccgttctccgttctgtttggtacgacatgcaacatacaagcccttgcagctatggtgtgaacggctggagacgatgtcttggatatggagcaacgatctaccatacggagtactcggcactgatctcaaacaccagccccttcatttatgaggtctacaacgtacagagtacagcatacagctgacaggctatacattgtacctttgcaatggaaaagagcaaacagcggtcattcgctaggtgtccttacctcccaagatggttgtcaaagcccggccaaattattcgacggtgcatgcatcaagcaaggccctgatatgcccaccgttctatataggaaagactcgagaaaatctaaacaaagcatagagaacagaattagacttgcagactaaaaagaatttcgaacaacgcataggattttcgcagtgggccgttgaacaagtgcacaagtacagggtaccacgtccagtaggctgtccaccacggggagcgcaggtaccaagtaccccccactgccgcacgcctcaccctacgcccaatcccccatcctcttcctcttcctccttctctccctccctctcttcctctctctctttaccaaccctttccaccattatcgcgagatcttttctcgcacgcttcttcgtttgcggagacgttcttttcttttgtgtgttattttttttcgggtaatgacgaaatccttcattccctactactcggacgggatggagccgcagatgtgatctggtgatccccgatttcaagttgccgcattcctcaggaagcacacgcacaccgagacctcggtttttttttttacttttactttcgcattactcctgtatctcttgctctcgttgcattttttcctttttttctccccttcacgattcacgacattgacgcgacgctgcgcgcttcgagtcgaagccgcgccgtactcatctactctcaactcccccaacacgccctcgaattcttcccagaagtcgcattgacccactgcgattcgcaagatcgcgacatcgccatcatgcctcaacgtcaactttcgcgcactctgccgaagaactttaccttctccctcggcgatgaacccaggactcccgagcgccctcataccgcaatgaatgtgcctccaccacctcgtcactcaatctccaatggccgcctgcccagggttcgggctcgcgctggtaccaacgtttgcgctcgcatggacatggatatgttccacttccacggctccgatgttcccctgccttcaattgaagtccctcaatcgactactaacttcgaagcgccttcattccgtggtttcgcccacgacgagggatatctcgcgccccctcgcgcgcgaatggattttaagacgccacctgcacagatccgcggcacgccttttgattcccacgacactggaaacccgtggccttcgtgggaccacactcctggcccaaacaactttaagcgcccagattcggcctgctcgagtgtgtctaattcgtcaatcgaatccattgaaacgttcgcatcacgaccgtctgtaggaagtttcaccagtgtcgagagcgatctgtttgactcgtacttccctttggagatgtccaaagaacctgagattgagtcgccttcgcgacctcagaagcagtcggcgcatgtcaaagcgtccaagaagtcctggactcgcgatatggatacccacttatggaatacctatcaaatctaccttcaggatcctactatgactccatttaagatgacacctggcagtatcccccctctgggagttacctcgcgtgttgcgcgacgcgccaagaagacatggggacagaagagcagtcgcattactgaatctgtctcgatgcggtctgttgatcccgatgaaatttctacacccaaggccatggacggagagttggaacgagcttggcccaagtctgactctaagactcgacgacgcctcaagatgctatgtcgacgcaaattctcgatttctccccactatcagcgcatcatgcagtctcgcactcccgagcctgtcgccgaaatgttcggccctgccccggatacccgcgtcaaggactttgctgataactcggcctacactactcgtgacctcggcgtttctcttgtcacctcctccgagcccactccactttctcgggttacacaagacttgccgtcaacgacggactggttcaacaaccctgtgtttgctcatgtcgagccaccagtgaccaagactcctagtcagcatcttcgtgtcgaatctgcccctagcatccctcgtcttggatctccattcgtatacagcacttggggccccggtggatcaaaccgccagctccatgaccctagtgctcgacgggagaccatccatgttccgggttatcgtgcccgacgtaacacatacttcgatcaatctttgcccaatcctgatgatgtattcgcaagcgtatccaggcagcagcagaattcttccgatcgggatgttgaacgtcgcttggaggactatgttcgtgacaacaagttccaagacatgggccatggtcgggtccgcgttcgcaatcgtggagctaccactagcgctgtcaatccaagagatatggaccagcttttctctccgccctcgtccctcaactcaggcccaattgagccagaggagactacacctgttttaaaaccccccatgaacccattgttagaccttggcgaaaatatcaaacgccttggctcacccttccgggtcgaaggaggacataagcgtcgcgaagccccgaagcgagtcattagagcacctgcactgtctgatccattctcgagtggtggcccttcatatgtcgggcctcatgacaacacctctccaatgcaggtttctccggctcaagtccgagataaagctccggttcctttgccatacaatgcctcagaggacggcctttctgatgctgagcgaatccgccggcaaatcttgaatatgccttttacgcgcaactaagttgcagcctttttttgctgtcgaatttccaagtatccgtttcatcgtggcgtccatttctttgcgagattttatcccctttgcattatgacttgaacgagataccgacagggccctggtacaacccttgcatttccagcatttttacgacagcaacaccaccatccacgactgtaacgacaagtctgattcacgctcaactccaacgacaaaaaacaccctaaaaaagtgatgggtctttcccttttttcatttgatcacaactcgcacacagtacatcgacatctggctgttggttacctgcctacgaacattgacctcgtttgtcttgtaacaacaccttgtgtgtagttctgtttcgccccttttactcgagaccagcatttctcaatgcagtttcatcattccttcactcacctcatttccttttcttccaacggggctctcacctcgaacaaaataacccaacaccccaaaaaaagttgaaaacaaccgaaaacccatgtctgctgtcaatcagttatcattcgctattttcgcgacccacgttccttacatattctccttatcttcttttctcagaccttgtctagtcgttcatcccctgcatttcctacaaggtacaacatgcatttctcaccatgacatcttggagatgtggtcgacttgataatggtcgccttccgaattacccgtcacacatggcaacgactacctgcatctatgctgacccttgccagtcaacatagatggcaatgcactccctcaaaaaagcgtgcaacgatacatatgcaagtacatagacgaactgaaacgaaacgaacgcgcatgaatattgcagttgaccaacggcatccctgatacgcaagcgaggtgtttggttttcttttgccagcgattcccatttcttcttaatttgcatctcatgatctcaatcttgaagctgatttccccgtgattttacttctcgcttggtgatccacgatttaccaccatgccctcgattctcgatttgatttagctcgcactccatgattccccttgtggcgagccttattgggtttgcatccggataatcgcgtttctttttctccggtctttttcttgcctcttctgcgtctcatggcgtatggatgtctgtctttttttctgctttttcagagcccttttctgcttgatctttgtgatcttcctctggaacttgtgagagtttggccgctttatctattcttctgctgatttatttttcttatgcgagggttgatcttttagagcaatggctttgtttgatcgaactgatccgccaattgaattatcatcttattccattttcatatattctttcggttgtaagtcaccgattgcctggtaactttgtacctgggttcttgagcagatccattcttacaagaagagttaactagctgcacttccagcacggattttcatgtgcgtcttgcaggcaattgccagcgaatagactcccttcattcctctatctcgcgttcaaggtatgctactaattgtctatgctctttcatactcggctttatcagctataggtactaactagataagctctagtttcgtccatttacccttggtttgttatactcgaagtcacagtttagcaaatagtatatgacctgtgaaagtttgaacagaagcgagtagggactcaagatactcggacattcaatggatagcttgccttaatgcaatggggaatcaatatcagatattatctacagatcagacaagcatatgaacaaacaaaagtaaccagaataaggacaacgagcaacaggtaatatgagcggaaatgggggtataagttataaaagatatctgcgatgagcaattcaacacaacaagaagcggaacaaaaaaaaaaaaacaaaacaaacaaaatcacttctccaatttcctcttccgctcagcaagaagaacctcaatcttgcgaatctgaagagcaagacccttcttctcggcattggcaaggagccactcctccatgtcttgacgaatgtgccgcatggaatgcaagacaggcagaataggcacagaggacagaccgtcatcgactccgttctcgcgctcattatgctgccagcgctcggcaccggggttgagcaagagatcgaagacaccggcccagagttcacgatcccagtatcgtttcagagactcgcggatgcgatagttgcggaatgatgggtttccgttgttgccgtcgatagcggtggattcgatgtatttgccgaataacagcacgtggatcacgccagcaataccgtacagatcaatatggtaggtccaggggcgcatctcgcggatttcattgcactcatgcgcaccggtttcccagtccgcgatgaattgcacggctggtgagaatgcttgcatgtcgatgctgcggccgaagtcgatcagtgctaagcccttctgtcgccagccgtgagagccgcttggggagtagtggatgctttcccggggatcgaaatcggttttatcggcgtcaaggtcgagcagggaaagggccttagagggaggttcgttgggattgtggtcatctaggcggacgaggcagttgtcggctttgatgtcaccatggaggacgccgttggcgtggagtgcttcgacggtgcggaatagctcaacggagaagaacattgctaaaacctcctcaagaccgccttcagaagtatggttggagttgatggcttcattgcggacgaggtttacgaggtcgagtatggtaccctgtcctcgatagtcctccactagaaaactttcacgtcggtggacatgcaattcgtgcgcgcgaacaatgctatcggtggcgcgagaatgatcaatggattgtcgtaggcgaatataggctgtgcgaatcatataaaactcccacgcgcttgatggtccattttcgaccttgactgcttcgaaggggaatcggggagtctcataagcgttcgagtttctccgtcgggaaattttgctgctagggcttgtaccatcgtcggagtcagattcgtaggattcaagactgtcaacactttcggcgagatagacaggggcatatgcaccggctcctagctcacgtctgataatgtagcttcgttccgctcctggaaattcgaggataggcgtgtcaaatgcgccatccccaccactctttgatcgcctggtgttggttttgacgaatttctgtatcatcgaagcatagttactatcttcgacgtgaccgtgataacccgtgtaggtcgcaagtggcttttccaaggaattgaggattgtgttgcgaatacccttgtcagtcggattgcactgcacatccctgattatcggttcccgtctccggagcttaggcgcgagggccttgaaggccatgggactgaatggtacatcggctgtagacgcaatagtatgatcttcttcgtatggcgtatctgtccccactagactagaacgaaacaagttaccggccggtgatcgtggcttcgaaggcgttttcgcgttataaatgctgtttcgagcggctgtcaaagaaggaatggattccgttcgctccacgataggtgtcataaagggaaggcgattttgggccataattgcagggtcacggtaggtaccccatggaggagcataatcctcgggcatttctggaatgaatcctttcctctccggtgttccttgtgtcgagctaccttccgctccatcactaacgacagaatgtgaggtgacttcataattttcgatatctgggatatcacggtctgggttgaactccgtccaatcgctttcatcgccatcaacgctctcagctcgtgtggtgttggcatagtcggtgtcatcgtaggatttgtggaatgtttgtgtctcctcgtctccaaagtcgctcgaggccgctgatatgtgccctgtgcatgtactatctccattactagcgcagtcgtcatcttcgtaatcgctaccgcagaagctatctgcgtctgcttcagtctctgccttcaatggttgattgaagatgctatatatctcatccgtcgctgcacgagtgtgcatggtcattgtcggttcccgggtactctttcgccgcacctttttattattggtcggggagtcaaacttcattttcactgcacatatgtgagtttattctgcccaaataatgacaaaccgatagcacttacctgtttgtgtctgtgttgtttcccctttaatcttagtgcgactcgctttgggtttgcctccatggccttcatgttgataatgagaatgaccgtgactagatgtagtaagattctggcctaaatgctccggcaagtcctctggtgaatgagatttccctagcagggactcagtactgcttgcgtttccagagatctgttgcaagggttctttttgttgccgccaattcttgcccatccaaccacgcttgatagccctaagctcttcaaagctcatctcatgtgcagggttggtgcggtcagggtatacggattccaggtcgacaaatacacgttcccgtcggccggttcgggggttaatcgcttcccttacgtgatgttcgggtagttcttttggtggaattggttctttgaaaggaagatctggattggactgaatacataataaaacaccataggttcatgccagcaattagtcctgtgatcgtaaatatgtggaggtctgaagaagcaatgggtaacttggaatgggaactcacctcgtccctgaagatggccatcttttgtgttggcgctgctttcttcccaaccttcagtgtttctcctgtccatggctttggctccacttcgttctccttcttgcggtcccgaatcgatccaatgctatcccatccctttgtcgacccaccagttgcgggaccgggcgcagcagagtcagcgtccgagaaaatagccatcttaggctttccggacttggttttcgcggtaccgcccgtctgaggcgagggccgtgaagcttgtggaccagcaggggcatctgatggcgcgaacgggttcatcttggcggccagcgcgggacggacagtcggcaaagcaggcgacgagggcccggtatcttgttggcgttggtcgtatcggaattgaaactcgctgtacttgcgtgccaatctctcaactggtcgcgcctcacggtccatgccgagcttgtacacttcatcggcttgtgaccaccgaccagcaccctccagccacccggcaaattcctcatagaaaagagccagactttcaccaatttgatgacgtgcaaggaaggcaaatgtttcgcgcggggcatcggagaagagtcgaacataatgaagccataatcgtagataccgagggtcgtttctgtagtgtgatgatgagaggaacgacttcgttgcccgttccaatagggggagaagaccggattcggtggtcgcttgtgcggacggatacgcgttcagagtccatttgacataacggtcataaacatcgagcggatcgtccgattctcctatcgactgcaattcactttcgaattcttggcgcatggcatcattgatggtcctggtgccattcggcgatggcgaggggatcttgtcaccattgctgccggctgaaaatatccgggcgagttctctggctgatcggccaccggggagtgattggacgttttccttttgtgcttcgatgatatcgaaatcgaccaaatcatcagaggctgccatgttagctacgacgacagataatgtgagatcggagagatcccaaattccgtcgaagaccgaaagttcaaaagagcgagtaacaactctggcggggctgcaaggagattgattctgtggctatcgataaacatcacatgactgttacccgggtgacaggtcacgtgtcccagacaacgtctactgtatcggagcagagaatggtcaagttaggctattcaacaagctcgatctattttatgaccacatacttcatctgtattcctgtgcggtatttgtgggtcttcagagtgtgtagggtcccgtcttgatcaacgaggcttggcaacatcaacaacctcttcgggtcttcaatcagggtacccactcagctcaagaggctctacactgtgacactttcagtgctatgtgttgtcaggaatctggatcgccaaggtgcgaagactctgaatctaaggtcagccataaacggaacctcagccatggaacatctgagctctcgccacccagacgatccaaacgacagaaatccactaccaatttgaaagaactttcttctccagaagcctcggagtcagaggccgaagaatttactcctacagttaaaaacgaggttgacaacaaacctctggttgatactgccaaggagaagaaaaagaaggctccagttaagaagtccaacgaagacgccaaacccaaaaaggcgagaaagtctaagaaagaccaagaacttgagaatatgcctctggcaccgcggactaagggtctgcgtatgttcgtcggcgctcatgtcagtgctgcaaaaggtcagtgttctccgcatctcatcgtctcaattcggtaataactcaattcttatcgagcaggtgtctttaattcgatatataataccgaaaatatcgggtaagttcgagtgtcttccaattacatccaatcatgaaatagattctaatcttgcaactagaggaaatgcatttgccttgttcttgaagtcacagcgcaaatgggacaatccagctctcccggacgaccagcgcgatcaattccgtaaactttgcgcagaaaagggatatgatgcaaccaagtgaataagccccatctgattggactcgaatgggtcactaacatctacccagacacgttctgcctcatggttcataccttgtcaatctagcccaaagcgataaagtaaaatccaagcaagcatacacttccttcctggatgatctgcgccggtgcgaggcacttggaattacactttacaacttccagtgagtcaaccgcctgccaatcatatcggcgcatactgacgctctccagccccggaagtaccaatcagacacctctacccgaagcactttcccggttggcagagatgttagtccaagctatcaccgaaacgacaaccgtagttcccgtcctggaaacaatgtgcggtcacggtaacacaattggcggtgcactgtctgaattccgcgacttgctagctctgatcccgaaagagcaccattcccgcatcggcatctgtgtcgacacctgccacagctttgcagccggctacgatttgacatccccagccgggttcaaatccttcctcgccgaattcgacgagctgatcggaatcaagttcctccgagctctgcatctcaatgactcaaaggcaccgcgcggaagcaagcgcgatctgcatgctaatatcggcacgggtttcctcggtctgcgcgcatttcacaatgtcatgaacgagccgcggtttgaagggctacctatggtccttgagacgcctattgaccgtgtcccgggacagaatgtagctactggagacgatgcggctgatgggagtgagagtgagtctgggaaaaagaaactcccaaagaagggtcctaggggacctgctggtgcaggcggagctgctgttcctgatcagggtgtgtgggcgggtgagatcaaactacttgagtcgctgattggtatggacccggaggacgaagagttccgggctcttgaggcccggctttcggaggagggtcgtgcagagcgcgagaaacatcaggagcaatatgagcgtaagctcgaagcggacgagaaaaagaaggcgaagggaccaggaaaggccaagggacagaagagtcttatggacatgatgaagagtggcgctgcgaaggagtagacatatattcttttttgaacgcagagcagaggggtggcaatgcgatgaggaatacttgctgggtgtccctgtgctttctacatcatcccgaggactatataataatgaaggatataatcactacaacactctcagggtttcaaaatacaaaccgccaaaatgtagcccttataatagctgttgaaagtagaagagtcgattcaattgatggtatcagttaagccaaagccaaaatccgcacaagccccttcatgcaaatagaaataggaaattgtgttccggtcaatcaagagttcgaccaattcatatctgcgaaagtagacatagacatgcgattccaagagccactaggttctcctcgagtaggtcacagaccctccaacaacgaagagagtataggtgacataaaaaaaaacaatcacatgcatgtgcaatataggtaaatgaagataggagaggggtagttaagaatgagtgtgaaatgctagtgctgggggacattttgatcccgaattggcgaaacagacgagctcgattgcaggcccggcgacgcttggcgagcaggggcatgcaagtggggaaaccctgcctcggccattgtagtgatagtcgcaggtgctgatttaagagaaggaccatcgttttctagaataatagaagtcgatattgagagaccacgcctggcaccactggaacgtacccgggctgatgatgattggtgatcatcgttaaggtaactacccggtgcagggctaatgatcctggagtccggataggcaatttgacgataatccccgggatcgccagtgctatgctcaccttcgtcggtgtcagatgcaggactggactcgcgactccaatcatcttccgggagctcgttgcgcattcctgaaattttcatgtaattgtacgctgcaatgctgctgatagtgacgaccaaaccggtcacattgacggttgtgagcttatcgtggaagataatgcccgcggcgctgattgtgactacttccttgaagataccgcaaatactgagggtaacaaccgaggagcgctttagaagcgcgaactcggatgaaatcatgcagaatgcaagtactccagggaaaatcagaaggaacgaaccaaataggttcccatgtttgctggcgagcgcgaggtatccttggtaaatctcacgaggaccctcaatagatagcgcgatggtgatgagtgaaaggaacatgataggagtcaggagaaagagagttgagaatggattggaagtagccgggtggcgaagcagcagaatttgtgtcagaccccatcggaagcccgaaaagaacgcggaggcaatgacaagtgcgaagcccagcgcattgaaagctgtctctccagcgaccatcatcacgacacctactgtcatggtggcaatgatgatgattaattttgtcgaaggtgtttcgagacggaaaaggaaggcgaataacaggacgaaggcaagtgcagacgatttgcacatggttaaaaaagtcagagagatgaacttcaaggacatgtttccgagaccaacgtcaagcgacgttgctgcaccgcacggaacgaggcgagtgaagtagaataatctggaaacgaggggttgtggttcctcggggccatcgatgggagatgtagccgcagaccctaccggtcgtcgcggacggagcgatggaaagatccagagtattatagaggagagagagaattggacaaccatgtgtaagctcgttgtgaaaagagggaaagggaagacgacatcattctcggagaacatccatttgttgtactgcaaacatgacagttgttagtttccttcttgacttccaaatatactggaaagaaccactcactattgaaatggacagtgagaagagataccatagcaagatcagcccgccgttgattaacagcttcttgaccacatttctgtccgacagaatctcacgaatagtaccatggctcttgacgtccgcgattctagcatccaacttgcggcgctgctttcgccgtcgacgtcgctggcgtttttgatgtgttgtgagtccggtttcctcgtcatattggtcatcatccgaactcatcgggtccaactccagagtctctgcagcggataagacatcggacgcatcggtatcctcttcggcggtcagaggttcttgttcttcgcgtttgtgacttcccccgtctccatgcgaccagagtgtgtcattgcgctctgtcgaaatcggttgtgaggctcgccctgtcccggtaaccatggagcttcgccgacggtggtgggcgccgtcggagagccccattttaatgactgggacagttacgaggtataaaatgaaagagaggaatcgagatgtatctccattaacgtgggaataaagtgtgtcacacgacagtacacgagggcgaaaagcctcgggggggtaggggagtattgctgacaaagaaacaaagaggggagaatccgaagggaagaagttaatttgaaaggaagatccaagtgagagctcaaaccaaaaggaaaatagaatgaaaaggaatgaaaatgagggaaatggccaaaagtgaagtccacagggaaattcagaggaatggcaaaaatcgagaaagtgaagggcggtgatgtttctcttttcgctcttcttctcctttctcgctcctttccctcctttccttcaacaacaattcctctcattggttacactttctatatcggtctccactgcccggtcgatccggggtcaaggggggaaaaagaatatcgagatggatttggatatttcagatatttcgattatttccgatatttccgatcttgactgcttcgagtggtctgagtggtcggagagctctgagagatcttctctggtttcgattctcattagtggaccgaaacctccggccttgacttgcgagctgtgaatgaaagcccaacatccacaaacacttcacttgccgcggtggcctcggattgacatagttcgttggtgacgggaaaggctgggctttcagtctcaatatgagtctctttgagaaacggcaatcggtctctcgtcgagctcatcaagtttgtctcctatgaaaaagaagaagccctaatccacccagcatagccatgacctcagattcaaccattatcatcatcatgtcgtgtctcgggaataatatatgtcggaggatgcggatcgcaagtgacaacggggggcattgcatctacctctgctttcatcttcttcatcttcatcttattctcttccatcttctttaggttgatgctgcaaaacagcatttgatcttcatcaaaaacttcaccagtcttctgaacttgcatcagatctcttagatatttcgctcgcattgccatcatgactgaacctgcgtacaatgccattgaggactatggcctggtcggggacatgcacacctgtgccctggtcagcaaggccggtagtttggattacatgtgctggccagtctttgactctcctaccgttttctgtcgtctgctggacaaccagaaaggaggcttcttcgccgtgaagccctacaagacggtagtagatgctcacagcaagcagcggtatcttccatactcgaacctgcttgaaaccaggtggactgatgaggatggcgtcgcgacgctgctggactactttcctgtcacacctaaaaaggcggcgcagtcgtcccggttgttgtcaggatactgtccttgcaatgaaccgggaaccaatcgcttcaagtcaggactgcagcactcgggcctgatcagaaagctggagtgtagccgtggctcaatggaattgaaagtggagttattccctgcttttaattatgcacgagactcgcacaatacccgtgcaaagctagaagacgacttggacaagcaccggctgcagactgtccacttcgagagtgagacagagcggctgcaactcgagatctttgccgattcacgggagccagataagcttggtttcccctcggcgtctttgaaactggaagaacgagagggcctccgtggccgcggattggtggcctggatccgtttgtcggcgggccagacccttcatctggtgttgcatagtcccgagaaggctgtccccagctcggccaccatggcagcctacctcgcgcgaatggaggaggaaacttccgactattggaccgattggacacgcaagtgtgccttccgtggtcattaccgagagacagtcgagcgcagtctcctaattctgaagctgttgacctacaaacccacgggtgcaattgtcgctgcgcccacgttctcgcttcccgaaaatgttggaggctccagaaactgggattatcgatattcctgggtccgtgacacagccttcacgctatatgtctttctcaaaatgggctacagcgaagaagcggaagcgtatgtcaacttcatcttcgagcgggttttcccgcatgcttgccaagatcaggaacccaacagcaaaaggcccttcttgccgctgatgttcactatccgaggtgagtacgacattcccgagatggaattggaccacctcgatgggtacaaaggcagcaaacctgttcgcattggcaatgctgccgttttccacacgcagctggacatctacggtgaattgttggacagtatctacctgtgtaacaagcacggaaaccccatcacctatgaccaatggaacgctatccggcgaatgattaactatgtcatcggtgttcggaaccagaaggatatgtccatttgggaatcgcgtggtcagatccaaaactttatctattcgaagattatgatgtgggtagccctggatcgtggaatccgccttgcggagaagcgtgctagcctaccatgcccggatcgctttgaatggatccgggtccgtgacgagatgtacgacgaaatcatgaccaaagggtacaacgaagagcgtggtcatttctgccagagttatgagagtcgcgaggtcttggatgcgtccatcttgattgcacccttggtattcttcgtagcgcccaatgatccgcggttcatcagcacgctgaagaagattttgcaaagccccgagaaggagggtctgtccagcgccaagatggtgttccgatatgaccacaagaaagccaacgacggtaggtatcgcttgtctattagaactctacaacaagtgctgatactcgcgtttcacaggtatgacagggggtgagggtgccttcatcatggtaaccttctggcttgtcgaagccatggctcgtgtaggttctatggaactacctaaaaaagcaacactgaactatgctaacctgaactgaatctggaaatacaggctgccaaatatgatgtggccattccaaacatctggaaactcgcacttgcgcacttcgataacatcctgtcctacgcgaatcacctgggcatgttttctgaagaagtggccatttctggtgagcagatgggcaactctccacaggccttcagccacctggcttgtattagcgctgcaatcaatctgggaagaagtggacgaatcggcgaatagagtcatctctctcagtggcaacaacgatagactaactataatactgttgtttttgaaccccaaaatttgtttgatgcaattctataattttctgcttacagatagaaaaaaaatacaactttgtgcctttttgtccaacactccgtacatatgtaggcaatgtaggcaatgtagcaaatatagatcatcggcctaggccagcctggaggtgaagacaaatgcttacataatggactagatgatcacacgggagctccagggccggtggctaccccagattctctttgttcatcatctttgactgtctttgttcaagacaaacatatccaaacaaaggaactgctagggtgctgttatcttcagcttctagctggagatgttcttcgccaccgaccctttgtgccttattacctccgtgagcgcgtacagggatccccacctgtctaatggcaggcgccagcttggattgggctgataagcctaacgccgattttgccttgtcatcggatgaagaggaatttgtttccagcccaagcactgcttcaagggagcttgaaggccctgccaagcaaaatttgacgctggctttggggaagttgcacttggagcaagaggacttgaatcaatcctctggacaggactcgactccaacaacaccccacatggaaggcctaattcaaacccccccagaacttgaaatggccaaaaagcctctgcagctactggacttacctttggatattttaaaggagattatcaaagaggtaacactggtcttccccgcagatcatgaatagatagcttacagttctggtgtaccataggtgacccatacgactgatctgacctcgctcactcttacatgctcctctcttcatttcttagccattccgcacatgtactcccgtttcgacatcgtctggcccgagtcgctgaacccatcaacggatgactactcgggggtggacgctctgtcttatggtttgtccacattggtcatgggcgaggatgtatttaatcagccggcgctgtttcaatctgacaaggtcaaaaatagctgcgtgaattgcggttgcaataagcctcatcctcagcccgacccggaccctggggacaacggagatcgcctccggtcgcgacgaggcaatcattatgcacagtatacccgcacattctctattggaaatggcccgctcagttgggtacaagaatactcggtgaccaaagaagtgggcaagatgctagggacgctagtcgctttagcagttgcacggatggtgaatctcgaagccttcgtttgggacatgccgactggagtggtacgtgaaatttggctcgcgcttgcgtcgttggcagatagaccaggacacgattgtcgcctggagcgcatttgggtgcgctggcatgacaattcggagaatgctctacgcagttcatcggcggcggcaacgaggctctttcagaaatacaaacacgtggaacatccctccttgtcagtactacctccactcaagaatgtgactgttcttgacatagatgaacccgcttatgtggaagaactggcaattctcattgagcggtcacgtttccgtctgtccgaactccgcattggtattgccgaaaaggcccatatgagtccgtggctgttgtgtgggaaggactctgatggctcaacgaattggcctagagctgatggtgtacttggcatcttatcgcggcggcaccttgacaaaaaacaggataatgctatagtttcctcccttgaagataaatcgatgccctctgacgaatcgataaacaagtcactaaaatctaccgaaattgcggctccattgactccaaatagcgaggagcagcctcccagcaccaccaaggacaagaagtccccaccaagctctggtttgtccaaccggagcgcccgctcacagccacctccctacaaatccgactatgagatacttcatctcaaagtactcgagctagaacgcgtacctctttctgtgccaaccctactgccagccgttgactggactggattgactactctcactatcatgcgatgcgatgatcatgaaaagctctggagggctctccgtcggaagtatgctcctcctgcgacgccggcaaaacgcccacatgatgcagagcgtcgaacaaacgccagctcagttgaatatccactaaatttgaaacatattcgcacggacactgtttcgccttatcttatactgttcatcaaagatgcgctggctccgaataccctggagagtgtgtatttgcatgaagccccaggtcatgaatctgctgtgcatatcgacgctatttacaagcacattctgcgaaagcacaggcggagtctgcgaaaggtgttgattgacgccactgaccgtataatcggcgctggatattcaggcatacgatggcacaagtggatgttcacccacgatatggtatcatttgtcacaagtggaaagatgccgcagctgaaagagctgggaatagcgatgcattatcgcgattgggtaagaaaacgatcaccagcattggatactttgatcacacctgggggcttgtgcttgtgctaatgatgattctgcagcatttcttcctccagagattgccaaacatgccccagcttcatgctttgtatctaccacacattcatcatagtgtccatcgggacttgaaagagcttgcgctgcaagtcttggacatcgtcagcatacgtccagatttgaagatcgcctacattggtctccacatcaaatgctaccaaatccttgaagcaagacatgacgataacccactagatttcgacgacaaccccgcgattgaacattccccggagcttagtgaagatgaggatgaagggtgggccaaccccaatcacgattctgaaggagacagcgatgattccgacgatgcctcgggggcagctgacacagacctcctttccagtgacccggacgactacgacactgaacctgacgaagaacagggtgattcgcggattcgttaccggctacaggagattctattctacgacgagaaggtatcaattttcaaggcgcgtcatggtgttttatgatctcatcttggcttgcattctatatcaggagttgtccggaccatttgcggcgtttaaaggggtacagagagtttgcacctacgaacaggagataccatggctttttagcttagcactaaggttatttgttaacctcggaatgacacgttattttgagttaaggttgtgctgagtgggccactctaagtgggtcaaagtggtacatagcggattccaataaatcgggtgtagtacatcgtcaaattagaaatacactttgctaagttcgtttcgctgggactttcgctcttggttcgtgatagcgtttcttcgtgcaaaaaatcctccatcgcgaaaagaatggtaagtcacatgacatggactgaattatcttggcttctcaatattgacgcttgtacttttctcttaggagagagctaaacaagtgtggctcctcggggaatcatatcaacttagcgaattggatggccttgtgccggccatagttcattcaaatttctgccctatcaactttcgatggtaggatggtggcttaccatggtggcaacgagcaactggaaattaattccggacagggagcccgagaaacgctgcaactacattggcgctgttcacttcctagcaacacggccagctatgaccggtctcgaaaatgttgtcacatttcgatgatttcgaggcggacagacccccacatatcagaacattttggcagtctcgcaacagtcgttaccgaagtacttcatcaacataggatcagaggttcccccggacttttcagctttcgcggatgtcggctcgggtcttcgccacgctgggcaagtaccgggttgataatcaattatttgctcactcatgcaagtcataatatcgtagaatttccttatttatgctaaggtaaaaccatgggtatctgagagagagcgctagtgttcaattgttatatacatggcgggacagattcgttcatgcaaactcccggtgtgcgttctcatactgggcacgaatcagctcgttctcgatcacacgtctcttagccttttcttcttcgctagaattgtctttgaacacatggtccatctgctcgagggttcggcccttggtttctggcacaaagaagtaagtccacattccggcgagtaagcaaaagacggcgaagaagatgtaagcaccgtagccggtgtcttggacgagaggcggggtgatgagaccctacagagataatcagtatgcttgacacaccgagcgaccgaataatggtagcgagaaacttacaatgatgaagttgttgagccagttggagcaagttgaaagcgcaacgcccttagcacgaagggaagaagggaagatttctagaactgtcagattgatgcttgtctaacaccataagagaataaagatacgtaccggaaggcagtgcccacgggataggaccccaggaagctccgaaggcaagcatataaaagagtaggaaggccacactggtccacccttctgctttgtgggacggccaatcatccgagtaaattccaaccaacgcagcaataacaatgtgtgatatggccatcagggctgcgccacctagaagcaacttgcgacgaccgacgacgtccatagtccagatactggtagtgacacccaccaactgtacaacgttgagaacgccggacatgataagttgcatgcttgtgtcgagacccatcgtggcaaagagagttggggagtagtaaataagagcgttgataccgatgaactatccatatgattagcatgtgtcggttatctccacgtacatagaactcacctgttggaagaatccgagtccgacaccgatgtgggtacgacgccagcagccctttttgaagcaatcggcccacgacgaaatctcctgcagaatggagttctttgtgccaccaccttgtaactctggatgcttttcccggttcatttgctggtggaagcgcacttcggcctggatatccataagctcctgacgaacgcgtctgtcggaaggtggcaggcaacgaagtctgcacagactgtcgagagcttcctcatcgcgaccctttgaagctagccagcgaggcgagaacggaagagcgtatacaccggcagcgaggataaagcccgggatcatttggagcaggaaaggaagacgccaggcccattcaccgtccatgtatcgtgtggcataggtaatccaaaaggcaatgacaattccgaggacgatacaccattcttccataaccaagagggtaccacgacattcggggggacctaataggagagaccggaataagtattcatgtcatatgtgtgtgaggaaggggaaaaaaaagaaatcacatactgatttcggagatgtacaatggtgcaaccatcgacaacattccgattccgaggccacctatcagccgggccaccgtcaacatgggataactgatggcagcagtctgaaggacagagccaacagtaaagatagcaacagcgacgagaatcgaataccgccgcgagatcttatccgcaatccagccctgattgagagcaccaatcaaagcgcccagctcaatcatggccgtcaacaatcccttcgcaaatcccgagcccgggttatgctcatctatccgcgggaattccgtcaggaactggtccatgaccagaatcaccgacacaacaccttgatcataaccaaaaagtaaaccacctagcgttgagcaggcggcacacaagaccacgaatgggctggcaaccagaccgcgcagaccgggtgggccatagggctcgcggtctgagttaatgtcgtcggcatggtgagagaagccctctaccactggttcatcggatagatctttcttaggaatatcatcagtcattttgaatggaaactggaagaaacttgaagaaacttgaaggttatgtttctttgaagcggaagaacgctctgctattcaaactctacccggaggcattccggcgatatttatacccatttcccccaataacctaaccggggtagtgtacaaggtcggttccctccgtatatcgggacctataggaagtctgggggggtccccggtccaaaaggccaatgagacaaaggcgtgataaccaagttggggtagatgacggagtgctagacggttcggccagcgggtttggggaagatcggcgctataggattgtggggaaaacacggagaagagaaataatagcacgtcgtcaattggtggcggctattggcatggtacaaggacgcttgtcttcctctgagcctatactcggcctttgacagatagacttctctcagccccagaaccattcttgggcttggccagaccgagacatcttgcatacggaatcggcatagaccaaggagtcatagggcatactccgtacagccgatttgctctaggtcctgttctattagattgataagcttatacagtctttcgtattcgtgtctataggtatagctagttcatacacactcgggcattcaaccaaagatcgccatcacctatcacatggaatgttctggacaataccagcatcgaaggtataccgtataaccgagccctaacaccctcgggccggacatcactcggaaagtcaagtgacttgtgagccgatcttatcccgtgatggtagttagtgtcgtgtgagacagtaagacataggcatgataggatcctttggatgaatcgcgacactaggtataatagtagaatccctgtgataccttgtcaatatcaaaccagataccccacggggaaaaaaagaggagaacaggctttccaacatctacaatctagctctttttgatagaaaatcggaattcgttgtccactttccaacctgagcggtgtccattgcggtaaccattttcccccctgcggattccagttcccgacttctcccccgccactcccaacctgcaaccttcggacttcccacttcactttgaaatcatggcttccttcatggaagacctgtggtcgagcatctttaccccaggacccactccaacccttttgattgcgaccaacgtcactttcgccgcactccagcttatcttccttgtcctcctcttagccacctacagcctccatttcgtcgccctgtccatcatcagcggtggactatggtggtccatcaactggttcgctgccgaggttcgactggcccagcaggcgcaggaagcggagaaagaaaaacaagggtcggagggtgacgcgaaaacgcggaagagtcccgctgtaagagaaagcgccgacagcgaaactgaaaccgaagtccttgtcgctaggaagacagacgataagtctgctcctgtcgcgactgggagtgcaacgtccgggttgatgcccacggcgcgcgatcctaagaagcggctcagcactggggatgggtcgggctatgggagcactgatagcgagtgggagaaggttgatgatactcaatcttgagtgatatgtggtactcaaggatacacacttgcttcgggatatttacactcgcctcggtggaacactgttgcacactgcacgctcacccaggccccggacatctcgacgaatacgtaggacgcgttcatggtgatacaatccagtgtcgaccttccgtgtaccttggctgggatttggatttgattttggatttgattatggatttggattcgtatatacgcaatgccctcttgtctgtttgtttcggagcgataccccatactatgtagatggtgcaatttacagcagctcgtgcttggttttgattttgctaggagcgtgatatccttcttctctctgaacacattcattaacaataacattcaaaacatcccatccactcgtacttcatacaaaacaaagtaaacagaaccggtggagctgaatctttagaaagcatccacgtgaccttcccccagccaaacaatgaaatccgtcgcaacataacataggcaaccatcaccatcgaacacgatcgcagcagcaaccagacacactagctgcatcccaccatgtccgatgtcccttgatcaaaatgctctccaccgtacccctcaatgtgggacgtaggcgcgtctgcggctccgtcttctcccccgcggctctcgaagctcatccgtcgaacacgaccgcggattcccaacgcgaacagacaccagtcgcatccttccgagaatcaaccgattcctcgtcaaccttcaaaacagactcgcaatcaacctcattcgcgacgattgggggattgacggacgctgcatccccagaggaagacacattaaaccaggcgcggcagacggtaaaagagtttctatctgtgcccaacctgggctttgaattgctttacagcttccggaataccgatggaagtcaggcgttgaaagaatggaaccggctcagccctccgtcgaaggagacgaccgaggctttggagtatcttatgcgaacctctccatggacattgttcgaatggtacgggaatgatattcgaaggcattttctagtcaatttccggactggcctgtctaaggtatggacgttatatgtcgttttgaattcaattggtctgtctgtgctaacggtcttatagatgttaaattccacgggggaagaagacctgctccgaacaatcgtggactgcttacagcttgcgcgtcaaatttatctcgctcccgtcgtgcactatctacttccgttaatagctactcaccaccaaggaggagggcaattggctcaactacagcgtgcctttcatacagtagttcaatacagcctaccatggaagaagatttcaccgcttctggccagagagcttacgcgagatgccgcggttatcttaggcatcgatgccctggacgaagattccgatgcggacagaatgagtctcgatggaacggagatggaaagagcatactctgtctcgtacaaagagtggaggcaagaatcacccgaagcccaactacacatgatggtcgagggtgaagatgactgtgtgacctttacacgggatcggctcttggcgtttctcgacggcttgcagcttgtcggacttggtggtgaccaggcccagaaggtgttcgccaatgtgatgaacatcatgatgggagacttcattcgtgctgcatatgccggcgaatggcagtcgccttcaactgcgccacagcacttggagcaatgggttgaaaatgtctatgcacggctcgctgcgcaggttctagccatcatccattctgatcccgctggaacccaatccggggccatggaagtgagcttgagggacgtggagaagtggcgagcaatgggtatcgctcggctgggcaagcttcgagtcagcgagcttttcgacgtggttgttgattggcccgtaagcggcggggcggtggaggatctgcgacgcttcacaaacaactcgtctggagcacgcatgtatgtgacgcatttcttttctattaacttgctccagcgtttgttgcatcccggtgcttctacagtcgagattttgcaggtttacatctcaatcattcgagcattccatattttggaccccaagggtgttctactagatcgcatcgctcgaccgatccggcggtacttgagagaccgcgatgacaccgtcaaggtgattgttagtggtctattggcggaccccgcgacagccgacggaccgacagctaccggcgacaacttggcagaactggcggcagagctaagcaaggtccaccagcattctatgcaaaacaacaggagcgagctagactatgacgatttatactggttgcccgatccagttgatgccgctcccgactacaggaaatcgaagagtgcagatgtcattgacagtcttgttagcttattcgactccaaggagacctttgtgaaggaaatgcagactctcctcgcagaccgcctcatccaaaaacgccagaactacgaccaagaaattacagtactagagctcctgaagatccgattcggcgattcggcactacaggcatgcgaggtgatgctgaaagatatttccgactcgcggcgtctcgacctcaccgtgcggaatgaccagatattgtctggatatcgtaagcaagcaggtgtcggaaaactccacgccaaggttctgtcacgcttcttctggccggagttccaagagcaagaattcaaggtccccgacgaaatcaccaaactgcaagagcggtacgcgacctgcttcgaaaagcgcaaggattcgcgcaagctcaaatggcgcaacggcctgggtcaggtcaccgtcgagctagagctagagaaccacactttcacagacgaagtgacaacctggcaagcaaccgtaatctatgccttccagtctgactcgagcgaacccgccacaagaacaattccggaactcgccgaggagctcgaaatgacagttcccctagtacgcagtgcctgtctcttctgggttagcaagcgcattctcactgaagtacaccgcgacaccttccgcgtgttggaaatcctccccacggaagacgaggaacaccatgcgcacggaacgggcgactatagcgacggctcagacagcgaagcaggcgacacggccaatgcagcggcagccgccgaagcagcagccgccgccgcagcgaaggaatccaccgaggcagctgccatggagaaaatgaatgtgcattggcagtttatcgtaggcatgctcacgaatcaagggcctatggctctgaatcgtattgtcatgatgctgaagatagctgttcctggcgggttcccgttcagcaacgaggagttgcgcgagtttttgagtggtatggtttcgaagggcaaattggagattgtaaacggggggaattataagatcgttcattaacatgggcaacggggcgtcgcatgcgagcttttttatctttggcgttgctggaaccgatgtacggaatacccattaaagaatacatgtatgatttacgagtgatagattacctcaattaggtagatccaagccgtggagtatctagtctttctctaacgcgcccctttttcttgtctacatgcaacatgttagtgaagttactgttctggcatgagatatatatagacgagccccaccacctccccgcctacacaaaccccaccaaagcccaatcccaaacatctcagagaaggaagaaaaagaagaaaaaggtatcatttcaaatctataagccacgacctaaccaaagcgagcatcattccgcatccaaaagcgcaacaggaacctgattatcaacctggatgccaccgcgcttcttctcatcactatcccagaagggcaacttccagccaccctcactctcaggcgtcgccagccaaagacgcataaggtggcggcggggggcaggaggcgcgtgatcggtgtactcagtgcgggcatgcaggacgtgcgcattcgacaagaactgaatatcaccaatatcgagaatcatgtgcagcgacaggcgcacgcaggttgcttccagcacgcgcagggcttcttgctgagcttctgacagcggggggatgattcctgcgtcgctgaagcgggtgagggagcggacgtagtacgggtcccatctgtttctattgttagatgctgaaatattgatatgggatatgggtggggggagaacttactttgtgtagacacggccgttctcgccgggctcgaggtacaccacgctggtgcgaatgtactcgtcctgtcccttgcttgtctcgcccttgcggtcgaagtaccagattggctctgtgagggtcttgagaacgtctgggcgttctgcggcgagggtgttgtagacggagtgggaggagacgaggtctgattcgccgccctcgagggccttggcgatgcagaggagaccgacgatgtcgcagtcgtcagcgtggaagtattggctagttagggattagttgattgttcgtttcttgttgcgcattcactagagaaactcaccgagcattggtgcggtagatgcgcactttgtcgatctgggtggagtcctcgccgagatccttgacgtggccaaggacgtggccgcggctgttctggctaacgaagtagccgagatatgtgccgagacccatgtatgccacggcggacttgtggttgccccatttctggacagggaagcccttgaagaggatgaagcccttgccgtcgatgaggtctgcgcgcaggtcgtgcaggtaggcggcgagagtggggagttcgaagttggtctattgaagtatgattagttctgggtttctagtttcctagatgtgaattgttctcacctttgagattccggtcagcggggtcttggatgcgatgaaagcatccgatgccttgctcagctcatcgatctgggcctcggtgaagacatgtgtccatttttctgggtgctcgcggtattcctcagccttccacactgttgggccggtgatttctttagggaacttttcgaaggggacgagctggtcgtatagcgggggatgttggccagtggtcttcaatccatctgggaacaaatcccacgagatgggccccttgagatcatgaggggcagttgggagaggggagatagcagcgggagccattatgaatgatttttagagaggaggtatgttgtacagatgaagcactaaatgaagggccattggtttttatttatattctgtcacttctattgtcgacggtgagcaatgtagtggattatatggcgtgacgagatcagataattgctcttgtataacaaaacgagtgcggccaccaaagaagtgaagctgattgggggtggaagagccgatatggcgcaatttgcggggtaggatgttgtgatggcagtgggggatcacgaatttggcttcaagatattttcgagataggtttattgacgagaatgggaagatagacaggatgtagaaagacttgaatgtgcgaaattactagttgtgaagtcgcgatatagtacttgacgttgaaacaaggtcacggtacctggggagtctaggatctacttattcaccaccatagtacatattcgatatacatgcacatctctgacatccacttgcgcagccagtcagagtctcggccgatagactaggccgctagactaagcttatccattgtcttctagcacaacatattctgaccacagccgatcgtaccgacaatcgtgcatgcgccgggtggtcgggttgttcccagagaggaagtgctctagacagatctattatccttgtagctcatgcaatgcatgcagagaatctatcgggcgagaggtttgagttctaccgttttaccttaaatatagttggtcttagggcttcggagagcacatggtaatccgttccttgattttaactcgcaaggttcgaatgttgcaattgataaagcacgctgtgcccctgaatatatctcgaaattctttcattcttatatacatctagccttcgaactttgcatatggtgcttgctctcgtgcttcttgatttgatacctatcaatggtctttggatacacgatttcatcttttgccttctttcctttttgcgatattctcccagctttccatttccgaataaacaatgactttgatctcttttgatgtcagtcttgctattcttcatcagctttctgcagacaaggattggctttcctatttgggatgccccaccagattactcaaatccttatcgggcgtggggacacgaacgccctttgatatcgaagttttcatttttgtgtatttgtagagttatacattcctttcgtttagcacatacctccatttgaatagatacccaagcccatggcccaacgcatgattcacgtggccgcgctagacgccgacattccatgcctctcagtatacaaagcgcggggtctatatagctcgcacttccgcgtccttctgcaagcagctgccgaacgcctgaataagaacccagaaaccctccggaacggacctctcgccatccatataaccgccttcgatgccgtaggcgggtctctgcctcctctggaaaccctacgaaccaaacctcagtcgccagccgagcttcacgccggaccactgagtccaatagacgcaatcttaatcacgggctcagcagcctcggcttatgaagaccagccctggatccatgcaatgcaatccttcatccgaacagtgcacacccactaccccaacataaagctcttcggctcctgtttcgggcaccagataattgcgcaagccctcctcagcaatatcgccaaccccatccactcaccaatatcaacattccacgtcgagcactccccagccggcttcgaaatgggcatccagcccatcaccctccagccctcctttaccgcgcacttcccgcctctcgcacgcgccacagctcagcacccattccgcatccagctgattcacggcgacgcggtggtgccgacacccgaggccgaagctgccgcggacgatgcgggagtcgcgctgccggaaccgtggtccagtatcgggaatagtgcgcagtgcgctatccagggtctttataaccccggccgagtcctgacgtaccaggggcactttgaattagatacttttgccactggggaacttgcgcaggagtttggacgtcgtgcggggtggtcggcggctgttgtgggagggtatctggagcagatttatcgttcgcgcattcctgggtttgaggatgatgatgattctaaggctgctgctgaggcggttttgttgttctttgctggggaggatgtggattctatgtgtggtattgatactgggatgattacgcctccgctggattgattgccttttttacggtcgggtagacatgaagagtaatggtatttggcgttattagctatatatttctatcagttgttgggtattgtgtccgagctggtttcgtttcggcgtttcggcgggcgagtttgttcagggtaatcccttgaaggcaaaccgtgcgccaagggtttcagatgatactgagcataggacacgaataggagttacgagttacaataatagttcgtcagctctcagccccttagtgacgacatactaggttaccgtgatcgtgttggaccctgcatggctgacacgcagctggtatgctggtctgcaggaagggattaatgcggtctgaacaaggctggaaatcgaattacgcgatacaatggtcatagttcttagatccgagatctcggatggaattaagggtagtacaatggaatataacaataagctgcatgaagctaaaggcgccttacatgaaatctaggcgataccgataagttacattgtccagaacaaagtcgcccgaagtcgactcgcaagctctccactttgtcattttaagtggagcgtgacatgcttgacatttctagtgtatggatagatagtgcagtctgataacagccttattacattattcttccgtatgctcaatatggttactactactattagtattcgatattgctcatacaatgtacctcgtacggcataccaaaacctcgaactggaaatctcagacttttctgttgatcccctgcacggccacccagaaccgggatggcgtgggagttgcaccaatgagaatgaaggtaattggagagtcggtggggactgggggccaatcatgctgcttttggatgctcttcatcggcattttgttatacagggtattggtaaggtactggtattggtgtttggtatttggtatttaggcaggtaatctagaaagctatgcctctagagttaagaataaatgggggtcagagctgacagatacttggaagatctgggaatcggatactcgagagagatatacaatatagtgaatggctacatgtacctaggtatgtattcaagcatactcatatttcaggtagggcataagaagtcacgcgctctaccccttccattgctctatcgcatgatgttccccaatattggtcgaccaagtataaaattagaaataacataatacaaccatggaaatctccaataataccatacgtaacattacgctgtaacgtggcgctagttcgccacccggagcttccctcccttctggaatgaagctcaggagctggggagagcttcagaggggccgctgatagcgcctatcgcgacatatttcggtttctttccttttgcccgggttgcgcattagaacagcgctagatatgtgtttattttatgaatagtccgaataaaaaaatcgacattcatagatgtcacataaccaaatttataaattcaatgatattcgctaagagcttcggtgttccaccggggtttccgacgaaccgtgctaatcggttgtatttaaataccagttctgtacgataccgtatcctttttttttttctttcatttttcactccttttccttgttaatttcctcgttaatttccttttcatttcctttcatttcctttgtatatcgttgaattccactttaacaagtaaataagctaaattccaagaatgggggttttctttaccagggaagctcaaagctgcacgcccctcttttggttatcgatactcgataggcacgatagccaggtattcgagctcacaactacagaactataccaccagaagtagagagggaagctattccggacgagaattaatagcagaattggaatccaacgacagatcccaaatattcacccaatcgaagaagcacggagtaaaaaatagaataaggcgaactctgcgtaattacccgtaatacccccagtgactctcccacaactagccctcgaagtactctctgaatgtactccgtatgagccgccctctcgtccttttccttttttttacccttttccaattcttcccttcttcttctctacacacagagcatgttgaactgcatttccctttcttgttcatatcaaccctgtctgtgcttggctgccctctttattcgcccctcctttttttatctcaactcccgggatctcggatgatcatatgcaccatgcctcctcgaagctcactgaccagctcgttctcggtaaccgatgccaataatgaggtggtctgtcccttgaagaacaatgatagttccaattgtcgcaagcgatgtctcggtgtgagtactcgcccccaagccccacctatcaccggcgtgcgagagctatacccgtgcaactcgggagttccaacttgaactaatccggttggtgctctaggaaaaacgctatcgctccatgcaggagcacattcgacgtgcgcacccgaaccactacatcccgaagctcccggctaccgaggagagcttcctgatgatggtgaacaccccgctcgagcaacgggtgcagctgtcacctcccgaacccgctcaacctcgtcgacctcatggtcagtttttgttttttgttttttttgtgtcttgattgccttgcttggtcgctacacgtactgacggctatgcacagatgtggcgccggaaagagacatctatgtggcggacggctccccgcctacccctcgagctctggatgaaccccacccagctgcggccacggcggcggtggctttggcacaactgcatcaccatagactggcctcggattgggatacagacatggtttgtcgctccgggctgttgtgggcttcgacccctgagtctctccacagtggcactgacctgcatttccccaggatacccattcggataccgacttgagtcatcctcgcatgcgcggggctattgaacttcccccactccgcgaccatttcaagcaggaatcccttccgccgtttacgcctcgtccgcgcgagcttctcccgtccatcctcaatcactccccgcctggtcgctcatccacattaccgccgatccagcggagagacaaattttgccgcccgcgcaaatcttccatcacccaatcggcccggaaacctaagcaggatcgccccaagtcaaaggaattcggccggcgaccaagcctcggtgaccgcaaagccctttcggcagagccgcaaaccgcggcctgggcgcaaggcaagcgctgggaggacttgattgaagcggcgacgtcggcaaccgaagtagacgatgagccatattcagaggtgagttttgatgcaattctggaaaattttctgggtactgatgcgccagttcaggctggtcggtctccaacgattgccccactactttccagcgtgacttctgccccctctggggtgaaaaatcggtcctcgctaccacccgctttccaatccacaggattgcctccgatctcttcacataggccattcccaccgcattcatacgccgcctcgcctttgcacaaatcattgaccccaccaccatacgagaatcaccgcagccgtgagagcgacttggaaccattcccatctattgaatcatcgctcgattccatgtcttcagcatcgggtagaaattttgcatcatcggtttcgggagtcgcgccgtccataaactctgattctagcccagttatgaatcttatcccgtccttgtcccagcgccaacatcaccgattttccaaccctactccggcgtctttccgcaacaaggaggttcaggtgttttgcgctcagtgcaaacgaccctcggcactgaatgagtgctatgcttgtacggagtgcatatgtggcgtttgccgcgactgcgtgggcatgttcatttcaagtccgcccgcttcattccgaaccccggggaatggaccattaaataatgcctcacaaggaccgacaagctaccctggtcctcgtgggtgtcctcgctgtcgaacggtgggaggcaaatggaaggctttccaaatcgacatcaagtgaacgacttcattaagacagcctacatttttggcattacgcattttacgactgatgtttggtacacgttcattcttatattgttatttattcttcattccatcggcatttccggttttctgggtttcttttttttttttttttttttttcactgatctggcaggatctatcatccagacgatgttgcaggagttgcttttctttttcaggccaggtcttttcggcgcaggtttccgacagtcaacaaaatcccgaagaagctggtcttcgacattcaattttctacgttctcttttttcgcattctggtggacaaatctttggtcatgaagtatatgctttgatgctttttcaagtctttcatgtgatgcaaacttgtactgcaatgatttcattttctgtttatagaagagagctgtggccatgggagacaggcgtgtcctcccacatccaattcttgatttatataaccaatctactcatcccagatgacactgctaagaccctccgcagttcccacctttccaggctcgccaacctgtagagaagcaatctcctcacccaaattccctgtcctcggatcccggcgcacaatcgcgaccgtcgcagaagcttgatttccaacggcaaccaggtctccagcacgattgatcacaaatgtccgcggcaccttgccaaatgcagaagatgagtcccgcaattcaaccgacccatctacaggagaccgatcaagcacaaccattgaatcactcggcgcgaacccctgatcactccgaatcgaaacataaagcgcattcccgattctactaatcccagccggcgtcgcaccctccggcataacacccccgggatacagcaccagtgtctgcgtctgttcaaaagacaaacacccagacctcgaatacgaaacgtcaaacaccatcatcgtacccccgatctcgttaacaagatagaacatcgtctcgccgacagcggctatcttccgcgaatgcgtcgacccaacctcagaccggccggtgccatctgtccaaaacacgccgtgtctcggcccgctgccgtaggtaatgttcacgctcggacactctgacagctttccggacgggccatcctcgatcgcatacacgcgcagtagatccgcgccgagatccggactgacgatgaacgagccggtcgggtcgaggatgacttcgtgcgggtgcggcgagtcctgctggtcgaatttgcccggtcttgtgaggttgaaatggaaggcttgcaggcttgattggttttgtttaataggtagggcgaaggttgagatagctgagccttcgctattagattgttagtataggtccacaccacatccacagcaacacaatcctaggcaaccaagactgggcatgtaggtaaggaagaaatacatactaatgcgcaattgcaataaacttcttccccgcatccgactcataaataacactattgacgccaccaccgacagtcttcgcgaccgcgccttgacgcagcgtgccgtctggtttgacatgcagggccgtcaacgtgccattcgtggaaggatcggcagttccgctctcatcggagcagtagacggtacgggtctgcgcgtctagggttaaccagctcggcatgtcgccgcaggtcttgagtgtttgtgatatggagaggtcattgttcttcagggctagggtgtagacgttcccattgtaatgggttgcccacaggtgggctggtttggaggtaataatggcggctgaggttattcccaaggcggagaggatgggtaggaggttttggaggtgcatttcagggctttggtagatgctgctacctgaaatctggtgtgatggattgatctattggtagggagtactagtatatgtagtgatgcaaagctgattggggtgggggattgggcagacgcggtaggggatcggcagtccctggctgtctaggaatggacgaggggaagaaaggggtacgagagtttttagggaccatcatgacaaagggtttttttgccaaaggggtgacattattattgtgtttatgttgtgttgctttagtctgtttccacaatgctgtatcgtgcatattaactatcacaatggctaaatgaattagggttaatcccccacattgtgataaagccacgagacagccacttcgtcacggttacatgctagctttcatcccatgttacgtgggggtctcttcgtgactgcgagggtggatcgataacctattcttcaatatatatgtttcgctaagagtcaattcagtgtcaaatcaatgtcaaaccagtgaagcaaacagcattgcacacaagctcggttccaacgacaccgagtacaagctaccacccaggttagccacatacacaatggtgttcgccttgtccaacttcaagccaataggctcgtggaaatgacgaattgccggtcctaaatgttgggcatactcgacaagagtaccagaaatttgtcatatcgtgccccaccatgacccctaggtgactttagactatctcgaaaagaagctagcaaatcccgctttattcagattcccacatgggagcaagctgggctgtttaccttcaattacaaacatatacacaacacgattcgtctttacagatcttgccataccaagtttgacatatcacttggccccggatacgtctttgtccctacacatatacatccaatgttttatagcgaatatcaattcagttgcaaaccctatctctggtgttggatatgtggcttagatggtaattggtcgtgggataaagatagtattgaagttgttcaccaaatttgacactatgaaaattgcacttgaaaaaggcgtccattgcaaccactatcttcctgcttatcattctcctcaacgctaaccatatgcatttccagctattcttattcttctccaggcataaccggacgtcttcgctttacctcatccaacaggtacagctgcagttgataatcttcatcagctgtgctagaaagtccacgtttgagataggaaaaatccattgcattttgattgccgagcgcatcgagcctttgaatttcagattcggtgtatcctttctggcgcagctttgcaaagttgtaccgctgtgtattttcaaggatagtgagcaagttgtgaaggcagcgtcattctagcccaagtcgcggagcccatcttgcatcttctttcgagggggagtcagagtagaaaggtaattggtgatgacctctgcaggtggctctctgggtattgtattatcagtgattgcgatagcatttcggttgagctcctcttcggacaggagtttgagaattttcccagtatcatcaagtatccacagtcctttggggggtggaacaaattcaggttgttcgtctgccgtgatcgaagactgaatgatggaagataacgcagagatcaaggcctggagttgtgttcttaactctacctatgtgcatatgtggacttctgtcacacaaggaccaactcaggattcaatagatgcgtcagaatgcgtttatataaggtttgcggcccaactaggtatttttgtgcaggacgtgtagggagtatatagttctaaggttcctactgatggtttcatcttaggttaagctagcgtccgaaatacggtattaaaaactgaacatgaattgattttctccatggccaaacagattagcagataagattctcaccctattcttaccctgcctattctttttgcacttaaagtcttttcaaaccctaattactttgctctatatacctctcccacagtcagtcagatacatacgaccatagggtgtggaaaacagggcttcccgtccgctcagccgtacttnnnnnnnnnnnnnnnnnnnnnnnnnnnnnnnnnnnnnnnnnnnnnnnnnnnnnnnnnnnnnnnnnnnnnnnnnnnnnnnnnnnnnnnnnnnnnnnnnnnnnnnnncgccggtgagttagtagttgggtgggtgaccaccagcgaatcctcactgttgtatgtttttgtttttatttgttcagtatagcaataatagtatgttcatcttaggccccattgtagaagtctataatgactttttagaaattaagctgaacgagacataagcacttgacgtatctatctgacgctatgaccacagcgcggtaacgatgagatataagttgctttaccaaccacggctatagttcagaattctcacccttgaggtgataggggccaactcactctaaaccttgtcagtcctagaaaaatataaatagtcaaaccccgaggcgcttctcttactctgccatgtttttctttgaatttctttgccaactcaactaaaatatgttctccgaaaagaatatcccgaaagcactctaagagcgtctcgcacgtgctatatcacgtggctttacacgtgaatatctgagattttgtaaggatcgcatggtttctattggataattgtcaaagtgcaaggttgaatacatggattttacatggtattataccatatagatcacatgacttcgagtactcggcataaccatggatatattacgtttagtcatcattaccgctcagattgttgaaatagccgtcttaccgcccctatacctgtaccaggaaagacgagagagaaacgacgagagagaagagtgaagggagaaaagacgagacactagggacgtgtggagcacttaagtcgttgttctgtctttctttctcttttcctcctttctgtctttagatctttatacgattttctatcttctcttcctttcttctttcacttaaactatctctaaggttatgtttgaaacttcaaggaacaaaacaaaataaatataggtcttctacggcgatgaatctgagtaaagccataaatgcactctgcgctaccagggataagatttaacatccgcagtttcatcaactgatgtatgaggacgataggaataattgaatcttgtacgttcttctattgttgttgaatgcttcttaggttgaatagatattgtactagatagttctttagacctatttgattcaagggataggctgttcagttactaggataatacttttatgccctttcgtatagagaggaagatgaagccgtttgaagtgttattatagcctagagaaagaggattaggtagcctgataaaggagttgcggaaggactaggatatataggtaggtatattgtgctatttcttatgctgtactgcttattggctgacctggtcaaaggtttcgtttattattattacgagaatgtaagtaacgcggattgtccggtatatatggttacaacggactctagaacgttatagtctattagactagacaatgactctatggtatacttgttcaattagtcttacttgattgaagagttataatccaataccttctagtcggtcactgtaatgctagattctcgactggatccagaaaatgcattcagtttaattggtttctgtcttaaaagaagcaattatcgccctatcgatacaaccgaaagaaccattaacgcaatctgatcgaggtaaaggatctgccgagcccctcgtcgacctcgtaaccttgaaagagtttgtaaccaggagcaattccgtaaccctcagcacctccgtaactttcggcttaacctccagatggacgtcctaacagaaggtcggagcgaaatatgatgcgcatctcataatatgttgagatataggtgtgactttctaatagttgcgcactttcgaagtcaagaagagttaccacacgactatctctgtcatagagaatattgtgctgtccaggatcatcaagtcggaagcccacttgtcgcaaagcatggatgccattaaggcagtcggactgaatgtaagcccgttcaccctcggatagatcatgccagagtcggtcaagccgtattccggctctctgctctagaacaagaacatagcctgatgggaatatagttgagcaaacaatttcccccctggagatccacttggcgaagttgcgacgtccggccggctgctgggcccaaatgcggttgtaaacttccgcctccgcttcaaacctaaacgtaacaagttagtaattccaatagcaagctattgaagtaatctgactcacagctcatcgtattgaggtccccagcacttaagtatcaccgttgatccacccatagttgctagccaggtcgccttgttttgaactgttggttctgataatagctgaaggcagttaacgaccctaggggtaggtccgccagcgttaataatcacactattcgatgtgatagtctcttcttggttcgccatcgacggggagtagtaagctgaaatatcaagtagacggccggagacccgggaaggaggagggcctcgtagcttctcagtatattagcagcttttctatatcctagacagttgcccaaatcaatacttacgtttcttggcttaaatgtctcgctttcaacgtactttggctccgacacggccattaaacagaaaccagcaagtaactggcgaagggaaggctgtgtaacgccacgccaaataggcgacgaaaggagaaaagaagagtcggcttctcgtttaacaaaaacggtggagttgtaggtggacagaaatccaaaccgagttgaacatgtacgcatctgagcaacaagttgtcctaagcaaagggccaagagtcagcgaacttgacgtgaaagtgagagaatgctaggcaggcatacctatcagtggctcgaggcgaaatgattcgggccggttgatatgaagatcttcgtccgagatggtccagggcgttttcatttctccaaccagatgaacgttaccaggtctaaggctggtcgcaaccagccccaaacatacgtctggggtagtcatttgtggggtggagattgcctgaaaatcagcaaatcgggttgacgccatacctggcaccaattcgagggctttgataactgggtcgcagacattgcggacaaacctcccggttaaaccaagctcattaccgactgtgtaaagttccgtctcatcgttcagtggaacttcatgggctatgccagcttgtaggaacactcggcaagcgtccgtttggaatgtactccatagagacatataggcgactgacagacggtcggaatggattgatgggttcaatgttcctccgttctggcttacagctggagtagctctagccaactgcgtctgggctggttccatgttttgggagatggaataatcgttggaatgacaaaaaaggttctgggaccctgagccgaggggcttactgttatcgacagaagtgggaaaattgaaagacgatcctcagagaggacgcaaaagacaaggcgagaagaattcacgaacctcagaggacgcaacaaatgacgcgaggtgggataaggagatgttcgtagaagacgaaggcggggcaaattcacgatgctcagcgaggacgtgaaagaaaaggcgaaaagaattcacgtagggctgaaatatccagtttcttcacagctgtggtccactagaatcaactacgggaagacttggtgaatagatgatgagttcaagctgagtgggatgtagaaaagacttggcagagtgtataagacttcggtcgacgggggcctcacttctgcaggaagtgcagggtccacccgtggacccgtggacccgtggacccgtggacgggtggtgagattacgtaatcatacttcgggcccgcgcactttctcggttcggtattttcagcagggcttatagcacttgagggttctaacatttgaaggttctcctccagtcatcagtgatcttccccggggtcggatctttccatccttcgggaggcatctctactcctaggcaatcacactaccattaccaatttttcacgtcctgatcttcggtttcctgaaataccaatttcatattggaacgaccgtggtcgttctgttttcttgtctgttgtttgacaacttcaggggacacccagtcagcttcttccggtcggaacatctaaagttgaaacccccgattgggaactatatccagcatatctttcatcaattacagagcttatacctattttcactaggatattgttaattgagggttctagtctaggtaaaggtaggggaccctcacccgtaagctttgtcctggtccggcggggcagtgaccgtcactccagatcccccttcagtgacaacaacaatagcagtggctgtttccaaattgaaggcatcttctatgtgagccgcaggaatcaccaggggtaccggaatatcatggttcgaatccaagcggtagaacattgggaatagtatccctgcaacggcaacagccgcggctgctagcacgcccacttggcgcttttcaaggctgcgagttataagtaccctatccgagtcttcgaggacgtctataacggcttggtaacacgccgagtcaagttctgcacacttactgtccatcacggaattgacgctgtcctccaggtctggagacagaaacagcatgatcccgttttcggctgggtcgcccactgcagtggcatcgagcacatctcctgagagagtaggagttgggacctaaaacgtgttagacagtttccctgctttaaaccgggataaattgcaagggggacaaactccattggtagtatattgggcgagatcgccaacgaagaagtaatcatcggcaccattgcaataagagagtcaagagaataagagcacgagagacgaagcgggcggcattacttccaatggacggtacaatgagtgtggctattacttgaattgatgagacattacgcattatatagccatgcctttcaagaaactctgtgtatacctctcatccctccaatttactttaaataagggtttcgtacaaaaacgtacaatcctccgacggattaatgactagactacgctttgacacaacccacaaatgggtccaaacgttagacccaggacccatcttggacccattttcaacccaactttttgcataaaattcctaattaggaaggaaacttgtcttttcaggactctttatgatttgtttatgattttgtacaaaaagttgggttgaaaaatagaaaaataacccattttgtcggtcgaaaattgagttttgtcaaagactattaatgactagaatactagcgttggatatcgtacaatcgtataatgggagaacccttcggcccccaagctagcagtaagggactgccttcgtaaatggggctccatactagttctctactagtacagcaagtgactcagaaggcggtggggggcactggaaggcacaaatatctccatctatcatttgacccggatatccagcaacctgctacaatgaagcctaacgcctttcagcgagaatttcacgatacgtgctccgatggcgacatgccaaaaatccataagactcctccatatcgcgtagctcttgttccttggctactagcttatcgaaaaaaatatcttcaagtaccttgagtttctttttccaagctctttcttcatccctatgtaaatcctatatcgacttctctagccttcgtttattctgctcagctttccttatctacttttccaaatccgccttaagctcctatatctcgatggtataggctgtattcttctaggtaatttcggtctcgattacctgtttgagcttatttaacttgagcttataagcctagcgagctttgtatagatccctagcgattataatacctgctttcgtctcgctaattactttcctctggttaataattttgcgctgtagttctaatacctctagaacatacttttcagattgaagtataagatatattacgatacggcgtattgtcaggaccccagtactaagaaggctgatgcctgaagtatgacacctgtcacggtacgtggaagcacgcgtcccgggtgcgtgggggactgtggactggacaggagcaatgtatgctgcctgcacagcctctatgggtcatatgacccataacctatatattatcctcgtatgctgcttctttagggaagtagctattagtttctaagatactactatatatactaccatctctatttcctaatcctccattatatatagcattcccttaggtattctatacctaggggtcttatagttctaatagctctcaacttttatggacctctattgataaatttttggaaatgaagcttgacgagacataagaaccctcgatatatagggacagaggtcaccaattggtagaaggttttgtacagctgggatgaaagaagtaggtacaatgtcaattcggaattttattcatggagaaggaaggcttaggcctaaggactagctattatatatccctctcccccgtttgtcctcctttaataattcagttaagttagcgcgaaaagtcgcgcggtattatataccactaaggcggtgccgaagtattaaacgcggtgcattaaaagtgcgagcggcaagagagatactggtaaattcttgattctccaaagcctggatagctaatgagatcctatcctcttgctctattgaatctgtagataattgggagcgtattggtggcatggtgggtggttgaactaactaagtcctaattcatggaagcgttttgggtagggtggccactcgcttgtgaattatattaatagttgtattaggtgataatgaatcccgaattcttaaaaggctagtttgaacttgcatttatcgtgataagctatttctgaaccagtggattatcatataaaccaccatcaactcgaatgaaaatccaggaagataacttaagagaaagaggcttgatctatcacacgtacatctccccagtagaccattcgtatatgatttaagtggaactgggtacccagacttggtagtcaaacggtaaaagcatcctagttcatgtcagccctgaataggcaatcgcgtaggcaacgtactcgcaaatctgtcggaacttgacgcgaatgttttgccgctccgagaaagtgcaattccagaaccgggtgaattccaagggctcgccaggcaccttctcccatatcacatatgtgacaaatccgcccgatatgatatctcccttatcctgcttcccaaactgatatccaagaagctcgggaacaactttacagcctcgctgcttgaagtgcttcagggcttggagctctgggggctcgaagggcccgatagcctgggcagctcggactgaagccttttgcaattctgttccaagccagggtatctgctggtagatacgcaagaacccgaggggcccttgcgcaccggaggggcgacacaaaacctttccagcaacgtatgcaggacccctaccatcaatgaaattttgctcggactgggtcacgatattcccttcaatcttttcgactatctcccagatcttaggcatgaagttaattaggggttggggcggagtgttcatcgtaatttgtgtaccttcgaggccagagaggacttaaccagagttggaagagttagacatgataggttagggattaatgatgttgcaaatgatgcgattggagtgactgatagaaagagacttgagaaagttgcccaggtaagagcttgtcaaccatgggtaatatacaaaccttggacgtaaaacatgcaaacaacccaacattccctaacctcggaaccacctttcattaaatcacctcttcatttatcgacgtatggctttgttctggatctatctcgttccctgagcccgtcagagcatgatcctatgcataaaatcaaaactctcagatacgaggctgtgactttggttcgcaacgcaacgtcagttcttatttaattcacagaacaaacattatatagccagtacattagcctcggggagctgtatctgtgtggtataataggatatcttcaatgtcaacgacaaagtcctttcggagaggtagaggtagaatgaagaaaatttatcattgggtaagctaaatgacatttggggtgtaacaaccttcgaaacagtagcggtttgaataatagtaccttcacgatttaaatctactccgcgaagtcagtttctgaacctatatatcagaagaccttttccgtttcctagattgccactctgcttcccgctgaatcctctcaaacttcatagtttgcgttcgtaattcatgcaagtcatcgtatccctcatctagttcctcgtagaaactgaggtatttctcaaacttgacatcgatgtcgcttgtttcatgatcttccatgttgaaacgcaaatttcgcgcgaattcttgaaagtcttggtcgatgggtctatagtcaattggctgtttcccaagaagggcatttttgaaccaaaactcttctacttggacgatctcagcactgcaccgtttgcaaatatttagcccaatttccacttcaccggcgcaaagatcacagcagtcgatcccctggtctttgcattccttcgcaatagtccgccagtattgaacctcccgagtgacaattttgtaaatgttgaaaattcgcctggcaatggatggataaatgtatccaggttcctgccaagggtaatgattgcgtaaaaagagatacgcgctcatcccgggccgtaacgaaccttggcgaacgggaggttcgcaacccagagataggatccaatctacaaattgaaatccttctgagaaaataccataagaattgttgatattccacctttttccagctttatcctttcctaggccgcggatgttcgggaccctatgaatccgcgaggtgtgatagacatcatggttctcaaacgtgtttttgattgccatacctaaagtctctggcgttggtaaatcgggtggtccatcaataagaaagacgcataccgagctcatctggcgtccagcatcgtgtttatggccgtgggcatagaccagaacacacccgtccgtggaaacatcgagattaccgaagttaaaaggctccagtgaggaatttgacaaatgtatctggtcaaaggaactcgatgtatgcaaaaatggttcttggggttcgagttcccctttcttgaacaggttgtaaatgtaatggacgatatccctagggattgcattgctagccaccaaccgaatctgaaatcccccgccacctattctcagacaaattcgtcggatggcagcgaagaggatatgtctcgtatttcccgcatgaaatttagcgatgatattcttcagcacttcgatttcacattcgtttctcaccaaaggcggcagacaagttactcgccgggggctgtacacggaggctgtaacaagatgctcaaatgcatcttcagcaacggcgatcacggtcaactcccgaactttcacccagtttggtagtaggaatgaagcatatgtcactgaagcatagaatttggtttgatcgagatgatgtgatcgtggcatcctggaacgtccagtccactcctcctccatcatacccaggcaggcccaacttatcgatagaggagtctcttgtaactttgtgatgatttgtctggcgaggattttcctagcgtgatcttgggttgattgtagcatcgtcgtcacattgtctcttgtcactaaaaagcaacgatattgactctcgacaaaggtggcatgtcgaatgatccccagctggttgtccattgcttcgaaacttttaagaccccgatgatagctgtcttggatgcttctatcgttttcatccgacatgttaggatgtattgctgtgaatgtggaaaatatgtcggtatctggatgaatcatgcttgcacaatcattctccccggatgctatgatccttagtttgtttaatatgtcctcgcgatatatgtcacgagcccactcaaagacataatcgacaatcagtaggagttgcaatgccccatttctcgatgtaatagagcctccccatagatcgaagatttgctgggagaaagttagcatgtgccatttttacaggaaacgtctcttggaacaagacccgcaggttaaacaaacatattcagtagtaccgatggtcccaggtttctcgcctgcatcattatatacgcatgccacagacactcgccaatcctctcctctattcattagtaaccagactaatggatcagcctgctgcttcgcgtgcggctcagtcatattcttcaacaactcctgcgtgcataacagagtccgcaccggaaacgcggattgcaacttaatggaattccaatcgctatctgccgacttcgccgacttcgcttcgagaagaagaaacgggaacaccactggatctccatcctcactgagcggcggatctcccaggatctcatgaacaagcatatcgtgatcatcctccgctctatgtatacacgctgtatcgttcaagaggttttcaatgtttcgagtctgccgaagtccgtagattgcatccggttttgttgcacttggtagttctttctggatagttgagtcgtggtgtactggttcatcttcccgatggccaaaaatccgattcaacccgacagcttccattctgcgtggcttgttagtgccagtgactagcgggtgatgtgttcctaatctgtaactcacgaatcctcaagtctgaagtctcgcggacaccgacagggctctcgtttattctgcctaacacgcagggcttctgtcatagtcgagttcccctcacttgtcgcttcgatttctgaacgccatactcgctttcgacagaacttgctgggttccaatataagccatcttgttaatatcgttggaattagaattcctaccatacgacctctgaagtaagtcgagctaatgcgtagggttcgcacgcaaaccgccaggtcgattcatttcgactcacacagcgcttagcccgctcagagagttcatcggcatgtttctttatttctgcagtccatggtgcattttcaatggctgtcgcacaagccgcataggtgtcgaattgcctctttcctagctcatcaaccgcattaaaagtcggacgatggctatcgggccattcagagcttggaacctctccgcggaattcaattctatacttccgtttgagtctttcgacctgcttccgttctttggatgtgaatggcatgggtaaagtgtaggcctgagacttgaaaagtgaaagagtatagctatgggcatcccgacagttgtctagatataaatactaatatatagtccaacactgacgtatgtggaaactcgcaggcgaaacttcatcttcgcggcccccaatcctagtttcaaggaggtaatgaactaatattactgttgtagctgccctacagcgtagggagagtcgggatcagcgggcagctccgggccgttcatctaggtagcgatcgccatggggtcaaactgctggatttgagtttcggggaaattaatctagttcattctctgcccaaagctctaagtaaagatctagccagaagaaattacgtgctagataagctagagtagactgagtactcctttggaatcatggaaggctctttttctccaccagtcctctatgctcttagaaagcttcttcaaaatgtcccacactttcagtcttcttaagactccactcactttggtatccatatcacgcgacaatgctgactacgttctatagtttgtacagtgccgccgccaagtgcgacggggcccaaaaatatttcaagtactatgcgtgaactagacccggggctgtactgaccaacccatgtaaccctcagatcggttgagctagacttattgtactgggtgatcagcaactggttctttgtgcgccgtggcttaggtctgttcctgtgaagcgagtagaaaatcaatagccaaatcctcatctcgccatcccctttaagccagaaggtagtgtgccctcaactgtattccagtggcgcaagattatgcgctggtcttagcttgaaataacccgccaatgaggtctacatttgaccactgatgggactggaaagttcgccagtcggcctttctcaatcaaggatactaacgcaccttgtagtgctacccataaggaaattgaaaacgaatcaacaaatatgagctgctacccacaatatctaaaacttcattttcgtaggttgttagagaggaatggcccgggcaacaaccaaagtatgatgaaacaccagcgcagaaggtgaaactaccccaacattagtgtggttacatcgcatattagttccgtttcccgaaataccaaattcctctgattaacggatatatatagctttctaacctgtctaaataacagggtaaatattacacaaattatgcgtactggcgatatccactgatgtcttcattaatctttgaaaagtctctccaatgtcgacctcatggtttatgcgggtcccaaccacctatagggtctttttgcagtcagaatctcacgctcgggaagaaagactggcttcttcgtccgaaggcttcctcttcaatcccatggcgaggtgaaattgagacggaaatcaatttagcttatacttcacaatctacacttatgccgatatctttgtcagggttgtgagaaaagatatccttacaaagaatagagataattttgtgatatgtatcaaattcatagagaatggattagtagatgccttcattgattttttcttctggtaccggaatttccagtatcaacggcggagggatatatgaaagactaaaagcctagtcattagtacgagttttgtgccaacgcatacttgcattcttcggcgcatgcgtgtgacgaagcaataagagccgtcatataccatggtgattaggtacccatatatcaaagcacgacggcagatggagcggggttttgtttgatgggagctagataccaccttccttggactatgcgagagttctaattcggactccaaagaatcgctggattcaataaaatacttagacaacgagaacccgctgacaaagtacagctttatcttgtgaggattttggcctctgttcagcggaccatggccgaagactggctcattggttcccgaaaatgcaagaatcattctacgtggtatttcgagattggtcagacaggtgtacaggtggcagcaatcaagtaagctttactatcggaggcaccatgatggcaagcctctcgaacgttgtttgctttttttcggtggtctatatctactctctatcccccccttccatttttctcttcttgcccaccctcatagcgaaccttttcttgccgtcataatttgtgaaaatactggatttctgacgataaaagccagctatcgcactcttcaaactacccctaccagcttctatccgatcttttgactttaacacgcatccttcatcaaggtcaaaagaatatcttgatcgtttcattcttccagctgctctacatgccacataagatggttccagctaaaaataagaagcccatagccaaatggtctatgtatccagctcttcacgacgaggtatcaacattgttggtcgaggaaaatcttcatttcaaattccatgaggatgacaatgacgcaaggcgcatcagagatcatgatacaaacataatgggtcgctttgtatgccataacccaggatgcaaatccaaaggatggtcaagcaaaatgatcgccgtcacaattcgtctatacccagggcaagaatataatgcgagggtataccaccaacactgtaaaacatgcagttgggtcagtcgaccagtgctggaccagtcatacgccgagagaattgtctaccggatcaaaaaatggaacggagtgccagtagagacgatttcgaattccggcagcagcagaggtcctcacaacagaaaactttgtgaggggtgcaaagccggacactgttcccaatcaagggagaatgcaggggtggattttattgcacaactagaaaggtttgtcagtctcaaatcgactaacactatttgatactcgtactgacatatgcttagattgactctctaacggaccagagatccaagtgggatatagaaaatcataatcacggagaacaacctttcatatatctgatccacctttgagaaattagggcaaggtgtcaaatggaatactatgggacaaagtcaccttcagtgcttattctctgttatgaaaaccttcaataggcctataaatcccagcaccactttgcaatatcttgctatttttgtagacccatatatatattcctgcaaggctttcaaagagcaaggtgtccttcgcaatgagcgaaaaacaggatcgacgggtttggcacgaaccacgatcttgaggactaggacccataattcgagccataaagtaaccaattactagggttcttgcgtggctgtgtgcagatgccaagatgccggccgtttcagctgagtatcgtggcccaattatgttgtactcttgctcggctgtcagttagtacatactgtattgtatgtagttcgggatgggtgactgcgaaggtgtatagcggccagtggccgaatgcctaatgttgcagagctgatgccttaaatgcctgatttatgccgcctataactactgtgttttgtaaacggaaggcactattgtcttaggggctaatcctgataaggcagtgtacctcttggcactctatttccagtatgcatggcgttaattatagtctcgctacctcttatagcagtggtatcggcccctcccgtagtagtcgaatcgcgagcttattcttaggaaacttcgctacgctagagctaggccgggggaagatagtggataaggttagaggaagagtaagaatactcgaattggagggagatggaggtttgtatagtaagaacaactttaagatcaggaaataaataaataaacaaatatatacggtcggaatatcttcaaactaccaagacttaggcgaacagagacttacatagtaggaatagctttattttagatgctctctgtcgttgtaatccaggtatttgccagtataaaatcaggcaaaatcaggcattcgaccgctggccgctatacaccttcgcagctcctcgtgtaacgaaccaaattacatggccatcccatacagcatgccatcattgccacttttcactcagtcttttcacgtctttgaccgttcggaaccttctcattactctgccaggtgaccaccagcgaatccatcctcactgatgtatgtttttgtctttttttttgatttgttaggaaatcccctcttgccgccctggtacatttggattgcccctaactactttaggtagcttgtggattagttctgccgaagttctgatacgctaaagaacaacgcgtgtcggtagcatttctcttctctatactagatatatgtagccctatagattataaggcgctttttctataggaataagagcggagggaagttagcggaagaggaagggagataggaaatttcactttggttcttccgccattccacaatgtattatcgcgacatctttcaatcattgtcacgccttcaccttcaaattttcggtttcttcactcatctctgatcagctttttctctttctttttgcactcttgtcatcaaatcttcacaccaacatgtctatcatgggatattcagataattgcctaggcacacaagtgaccttcaccactccctcgcctcagcagtgggttctcgaggagaaactcaccgaggatttctaaagcattaccaaccgtgaatttgagctgggtggtggaccttccttcgctgtgtcaaagtacctctgctacagtgcgacagatagtagcaagaaggcattcatgagaatttactttcagattcctaaccccggaatagagtcccagctcccccagcttcgatgataataggcagctccaccccgtcagcatttggagctaaaagctcgaaggatctcagtgaataacactgtactatggtcccagctctcctcgcccacaaagaaggaaagcaaggcaaggacggcgtggctctagacggctatataacacatattgtatgggaaatggtccgtaggaagccacttgatacagatcagttctagaggcctgaatcggcgcatttatacaaggccgttcgcacgaagttccgccgtatctaggagtatgtttacagaatccccattagcgtgttaagagtgaaactgacaaacctaagagagttgaagcatcatggatggcatccatagctccctcttttgcagaatattatatacgagtcaaccggaggtatgtatgtgatatacgatatgcacctattatgaaacagaatatgcttactgtctttaggcacattgcaggtttccgagaccccgaccgcttcgatctcgacgaggaattttccgacatgacctttgtcctctggcgttcaactaggccaccaagaaagtccggttgggagaaagaccctaccaagtgggcctgataatcatcatggatgcccgtttccccagctcaaatgtgttgcgccaatgaatcgaatttttgccgcaattacaggaatcgaagttgatatcgaatgacagcgtaagacttccaatttgctaactaattgtccgcattatcgggccgaccacagtagttgctcttttttcttgggcaaggcggaatgctttttgcaaatcatcaaagttcccagtttaggcggccacaatatgatacaagatcatgcctccgcgattggaacttctatggtttccgcttgtgggtcgcgtgtggatatgtcggtgcagatatgtatgttgtatggagttgaaaggaagcgggggaatttctactccgtaggtgacggtcagctaccgaacaatggtacttgtagtatcgggaataattgccaggcaatctccaagagccacaatatccacaatgaactttttcagtagtggcaccaatagtcacatgaactggcgtcaatagtagcaaggtcaacccgatcgataaacctgcaaatactaggctctaacaaatccactggggaaattgagggaagtcggtcttcagtttgttgtctcttagaaaagcctcggcacaccaggcacgtgataaggggtaaattgttgcctggtttgtcaggcgagcaaatccttgcacgtgtttacttctcctattatctatcatgggccctcttagagatttccctcaatctattgggcataccaattagattaatatcgtttttcggcccgaattggtagaattccgatgtcatatggccagtgatcactattattgtcggcttctatcactcttctttcttttcatgctacctatacgtcttttcaaggcgaagaaatatacatttcatcaaaagtataagcaatcacatgcgcaaattaactaatttaactacattccccggaaacccaactgatctatcacgtttgtacacgtgcacactaagccaggtcggccaataaatctcctccgatatataaccacccgttgccgaaagttggtcgatctccgaattttcgctctctattactccgcatatctacactaatcctacaacgctgtgggttaaggtgacaatgcataataacgatctgcagagtgagcgacgtgcagacatgattggccctaattgcattctatcgtatgcaaatatgttatgcttgtggtgtctgcgccgagacacgaaagtatatatagagctaaatcatataatctttgtgatgtagttttgagacttcagattctgggactcatttataacaacattattcggtcatggggggaattctatcgctcaaattgctgccctttgtggctagctgcgcctttgctggtgtcaattatcctgagatcccgaaggacttgactacaccattccagcaacgattgacagtctatggacctaatggtaagaagaccggtagatatagtgggcttggagaggactgacttattcatctttagctgtgtcggttggttggaacacctatgaacagctgaatcaaagttgtgtgaattatggcttgtcagaaaccaacctgaataccaaagcttgctcatcctcgtcgactacctacgatccttcccggacgtggtcaaatgttgcagtcctaacaggcctgacccccgcgacaacctactactacaagattgactccaccaactcgaccataggccattttctcagccctcgcacgcccggcgatagaactgcattcaccatggacgtgatcattgatcttggtgtctacggcaaagacggcttcacaagcaaaagaagcacaaaaaaggacactattccagtcatcgagccagaattgaaccacaccacaattggtcgcctcgcggaaacaatagacgactacgagcttgtcatccacccaggcgatttcgcttacgccgacgactggtatcttaaattcgcaaacctgctcgacggcaaagaagcctacgagtctattatcgaacaattctacgaccaactagcaccgatcgcaggccgcaagctctacatggccagcccgggaaaccacgaagcagactgctcagagattccatacttgaacggcctctgcccaaaaggccagaacaacttcaccgagttcatgcaccggtacgagaaaaccatgccgcagtcttttatttcgtcgtcaccaaacccaacggcccaaaccctggcccgaacggcccgcagcctttccaacccacccttttggtattccttcgaatacggcatggcccacgttgtgatgatcgacaccgaaacggatttcccaaatgcaccaagcggccaaggtggctccgccaagctgaacggcgggccatttggcactgcgaaccaacagatcgagttcctcaaggccgatctcgcttccgtcgaccggtctgtcacaccttggctaatcgtcgccggacacaggccatggtactcaaccggaggatcgtcgaacgtctgcagtccctgccaagaggcgtttgagggcctgctttaccagtacggcgttgacatcggtatttttgggcatgtgcacaactcgcagcggttcatgcctgtggtcaatggtaccgccgatcccaacggtatggaggaccccaaggcccccatgtatatcgttgctggaggccccggtaatgttgagggtctgagctctgttggcagtaagcctgcttatacggagtttgcatatgcggatgactatagctacagtacgcttaggtttttggatgagcaacacttgcaagttgattttgtgaggtcctctactggagagatcttggattctagtactttgtacaaggaacatgcaacggattttgtggaccagtaatggaagtttggggataatagaggctatttagttatgacatagggcgtgggacgatgtgatagtgaaatagaatgtgaatttctgtttacagggctttttagcacaagaaagtgtgaagacctagtaatgtagggaagaaaaagagtgtcattctataagaaaattactatataaagaaagaaataaagaaagagagccccaatatttccaatgccatctaatatgcacaatcatccatcccatcaattatttacatacgccttgcctcatatgaccatatatgcatcaaggatctaatgtaaccaattataaaagtacagcccatgtcgtatatgtggctctcatcgatgcgatagctgactattccactccttcgggggcgtcgtcgaacaacccgccccagatggcccctggaagccccagggctcactatgcacgacagtctcggagacaactgtgatatccttggaggaaggctcagatggagcgaggatatgctcatcgctgccccacgcggaggtctgcatatgcgttggcgcggcagcgttcgttttactctttttggtgtcgccttcgccgcgggttgtcaagctctttaaacctcgactggagagctggtatggctgtcccgacgttttacccgaggaactgaagacgtgggagagaccaatcttcctgaagcccttgcggataagtggttgaatgatgggcaggttagagacaacgattgagacgaaagtttcacgacaggcccatttggagccggtttcagcgccgtcggggctggactatagtgcatatgtcagatatatgcgtaaatcacaggtgtgtgtgtttctgcgtgggaatcctattattgcatgggacgtaccttcataattgtaaccgcccgaataattcccgctatcatgacgaatgtagcgccggaaaagagagccataagagggatctttcgtttcagattgatgttgacagtccaaagaagaggcagggggattgagagaaggtagatgtccgtggtaatgttgagtatcacgatgacgaaaacataaacgggggagttggctggctgacagaattctgtaaatatatcaaggtaagaagactatggattatatctgattgtggtgtaactcactgccggggtcggggtagatctgccaaaatgcatggaagggctgacatgacagtaggatcgacaacgctgctgcgaggtatgtcacaattagaaggacataccccagtcgaactctggtaggaagatgttggagaccagtcctgtgatatgcttagcgcattggttcgttatatccaaggtggtatgtgaagcgcacgtcaatcgagagtagaagactgccaagctgaatttaaccagccagagaatagccgtgtaaaatgaccatccaacaatttgggtcttggagccagcaacacggtgagcccattcagtcgaattggggtcaagagctgctcgagcttcagacgtcatgtaactgttagtaaggccctggtatttggcaccgacgaggtatgctgctactgtttcaagtacgaacaggatctgtcaaaaagcattatgttaattataacttctttcaatggtgtttacaggacaggtgaagcaacttactcccgccaatggcatgagataatcatcaagttggaaatcggccggtccgacgagcttccatcgtaccccgacacggactaatattatgatcaaagccaaggacaacaaagtccatgcttcgacgttaccggccattcttgcgagtcgtcagttgtcagcaaaccaaaggacaaaataacggaagatgaaagcgggagttggagagaattataaagaaaggccccagccagaccgacccgcttagaatctccagaatatacggagtcgggatttacactataaacttgtgcgactagcttgccaggctaatcgcatagtgcgaatagcctacccctggaggatcatccatgtaaattgtgtaattttgtaaatttgtgtcgtcccaccggctccataaaatccaccccgctaagaggggtagatctgtaattggtgcgtggccgacggtccgtgagtccgacacgggcgggaggctgatacgaggggattacgaaattgaggattacgcaccagggatgcgtagaaaattacaaggctatgcaagccggcaaactgacacttgcctgtgatataaattaataagattcggacgtagaagccgaaaggggaagttgaactcaaaaagtataccccagccctgccttgaggtcccgtatggagccgatcaaactcaaatcttggtggggcggtggggctccgtaaggtcgagccataatgtcccgacccacggctcagccttcggaaagatttcggaacccgttacacgcgctgtggggatatccgtggtgacgagccaactaccaagggtatcattggccaattcatgaaacagcttgtccaggtgatatagggcttcaagaattccttaaataaccacattgggaataggcccccctctccccctattgtcctccgctgttctccgaaatcacgtatttattcttcgtttcctcccaataattgaacacaaatttccaaatttccaaattttggtacttacgttttggtgatttccacggttcactcccagttgatatccacatcgtttcacaaagtgcaatatgtccacctttgactttatcatcgtcgggagtgagtgatcttcattatgccctaacttcgttagcccttatccctaatccgtcttgcaggtggtccgtccggctgcgccctcgccgccggcctcgctaattccaccgcaagaccccgtgtcctcctcatcgaagcaggtgacaacaaagatgatcgcaaccttcgcgtcgacggccagcgatggctgaccttccaggaccagtcaatgaactggggattcaagactgctccgcaggcggactgcaacaaccgtgagatcgactatagtcgcggcctgtgcatgggcgggtcaagctccatcaatttcggcgtgtacactatcggcgcacgcgatgattaccaggagtgggcgagaattgttggcgatgacgcttttgcgtggacaggtgtgcagcaaaagttcaaggatctggagacattccatggtgagattccggagggcatagatagaaaatacgtggctccgaagacggagaatcatggaggcgagggcccgttgcatgtgggctttgcgcgggagtgggaacgggatttaacagacctcttggatgtcttcgagcaggctggatttccattgaacccagatcataattccggaaatccgattgggatgtcggtgctgattagctcggcgcataagggcttgcgctcgacagcgggggatctggtcaaggagagactggataatttgacaattgttactggagcccctgtgcagcgtgtcctcctcgaggggaaaaaggctgtgggcgttgaatcaaacggaaataaatgtgaaaacctaccttcgctgcgagtgacccagatattaataattatgaacagatttcgccacaaaggaagtcattctatccgccggctcgctgaacgaccctcgtatcctgatgcactcaggcataggccccgccgcccaactccagcaatacaaaatccccgtcgtccacgatgcacccgctattggtcaggggcttcgcgaccattgcttcgtcccgatggtaaacactcgtacagaaaccagcacagaccgaaaggccttttatggcgatgaagccgcaatggaagtcgcacagaagcaatgggaagaagacggaacaggaccttgggcgaaatttgcctgcgagttgggcattggctggttcaagttgaccgagcagctcacttcctcgccggaattcaaggccctccctgcagacgaacaaaagtatcttctacaggagaccgtgccgcactacgaggtcctcacccattttcccgttcattgggtcatcccagatttcccggatgaggcgttgaattactcctgtctacttgtcttcttgttcaatgcgcagactcgcggagaagtcacattgcagtcgtcagatcccgactctccgctctctttcaaccccaagttcctggcccacccattcgatcgccgactcgcgatcgaggccttgcgcgactcattccgtgtcgccaagcacgaatcctataccaaggacaacgtggctgagctggcaatgcccaagggtgagtcagacgaggatttgctcgagtactggcggcagaatatttcgtcgagctggcacatgacaggaacagtgaagatgggcatgaaggatgacgtgaacgcggtcgtggatccggatttcaaggtgataggtattgagaatttgcgtgtcgcggatatgtcggttgtgccggtgttggtaaatgcgcatgtgcaggccgttgcgtatgtcactggtgcaatttgtgcagagaagttggcgagggagtataacctttatttggatcaaaagcacctagcagtgtgagtaggctctaacgcaatgcaaattgcgtattctagttatgtggtgttcttatataaacggtacatataattgacattgtttttcctcgatcctcagaatagttagggaatagttacatagaaatacacgtataatatgactaattgttatcaggggatcacgtagcatgttgatcaactccgttcgatgtcattgaaggaactattttccttcaataatctatgctacccacttttacggcaatacgaaggtacatatattataaatagtagtattttgagtttaatgtagatttctgtgccgttaaacttaaagataagtataattataaccctattgttgtaatatatagtggggcgccttaaatacataccagatcataccgtgggagatacatagcagaagatcgatcagataagtttgcgacatagcttttgtttggatcgttctctctgtcatttcttctcttcttcttccttttttctctggctttaatctttgagtcaaatggactctttccatcgatattagatctgccttgtgacagtacctaggtattgtatgtcgtggccccgatgatcattaccaatcctgtaaggaggaagtctaggcatttgcctatcatgcccgtaaaatcgaaggatcgtcggagagcagacgctttaaaacccaaggaggtttgaaactcgtaagacgtagtgcatttagagtggtataatatgccatttttgcattataaccctgcacaattatacatagaaagatctgccctatggtttactactctagctacgaaacctgaaaggggaaagcttatctggaaaaagacatcaaaaatactactaaaaagacatcacgaggccgcataagcgaccgactattgtaatccgacatcaatccacctggttcaaaattatcgagcatcttgactttcttgatattgtggttcccatcgaggcgcttcaatctatgtgtcaaaattgatccgtgcacgaatatcataaaattcatggaaatgatccacatccttgagtcttcgtccctcttcgcatcttgactattcttctcctctcaaacccccaaggcatgaggcattggaaagaaattattatgagatgtcaatatgggaggacataaccagtaggccctaagccgcaacatcaaattattatattacaaccttcgaaccttttcattgtatatctcgcgttagtcctatagtatttcattaactttggttttgcctgttgatcaggaaagaactacgtagcaattgataatctatattggtgccctccctttttatccaggaataagaattttcatgaaagttaaatttctttctttcgattctaaaccatcaatgactatccaaaaccaatctcaagtcgaaagtatgatacagtacatcatgccaagactgaaacctataccggggcggacgctgactccttagtctccttctcccgtccccgaattttgcgtcgctcgacgatcacagcaccaataattttaatgcaacacaaagccaatggcaacagccacatatccaccattgccttattgaaagcgtctaggacggcgatcttgtctgccccgtgtaacccgttggtcagagtcatgacacctccggtcatgatttgactagtgtcgatactggggatatctgttttggcaatgttttggtctaggtggttgatgaagagggattgagcaacgccagtaaagattgcactatcaataacatggcagtaatttatggctttatcattttccccttccggtaggatagattctagcaacacaataccccgacccaataagaatatccaccaaatcaagcacattctgggcgaccataaccggcgtttgagcacatacacccatgccaaggccgaagagaatttggtacccaatccattttcccgtgccgatgtcgatcgtgaatgtggtgaacagacctgccccgagggaaataaatttcgaaccaaaaatgaggaatggccaaatgcggtccgattagaataccaccaagcagcgaggatagggcattggcaatgcccagaggaagggtgtccacaccagcgccgaagggactcgtccctggagctccttggaaccaactgtagattcattagcgagtcggctctgtcgcgtcatgcaagacatggaatgtaatggaataagacatacattggaatgtaatagagcagcaagaacgaggcaccatccattcgaatatatcggtacttatagagttagtagagaattttcattgccaggaaggtgccgcttactgggaacccaaatctcatctctttacgcagattgtgtgtgctccgtggcatcaaacctggctgtcgcgaatgtgtacttatacattgtacgcttggtaaagaccgtactgggatggtttttgcactcttatttctccttgctggggtgtccgataccgttatcgccagcgagtacggcctcagcacagaaggccttgcagggtgtgttgacagcattgagagctatttgaatcatgctaccgaaaatcgtgatgacgcaaggaaaaagccgaagagatcattgttgccaagtctgtttctccatatttgtgaatttgatcagtcatctgactcgaaatctagagaagagaacatgattgcgagaattaagggcattcgggacgagtatggcacggcagaaaactattttctgcgggaacgcggcctttctgacgaagatctgcgatgctccagatcaattttactagcaggcgacgacttgaacattccaacagctaaagggggaagaagtcaacagtcggcattcacgtgaatgcaggaagcgacattgcgtaggctgctgccgatatggtgttaacgagagcaaataagtagatgtgaactgattcagcagagttacatagaatatgtttctatttgataaaggatctattaaaaatacatgataatgcatgccttcacatatccatccacaataattacaaacctccgaattccgaaaatgtacgaagacacccaaattaattaggaactggcctcaagctcactcagaatctcatcagcggccttctcggcgaccatgtaagtagaaagcgcggtgaaagtaccggggactttggggtaaacggaagcatcaacgacacgaagaccagagacaccgcggacacggaatttggagtccaagacagccatcgcgtcatcatcagcaccaatggggcaagtgcaggatgcatggtgaccccaagtaccatccttgatgtaatcgatgatgtcttccttggattggacatcagggccagggagaacctcagtgatgttgacggcctggcgcttgaacgcgtcacgggcaagctggacagcttcgtacatagcagtgagatcagcctcgtagtcgccgacaccagtgtcgaagtagttgaaggtgatcttaggcatgtcaagaggatcagcggactgcagaacgacggttccggcagagttgcgggggtgagacttgagaatagcccaggtaaaccagttgtgttcgtcagtcgcattgatactgtagtcggggaagtagccacggaagttaacagggccaccgaattcgaaaatgtcgaagtcatcagtggccgtggagctcttgtatagcatggtggcggcgagaccgggggatgagtaaattccgtggtcgccaagaacaggagactcccaatcactgatgcaagggtccgcctggtcgcgaatgctgaaggtgcacgtgtccaagcaggagaagtcctcctcgacctggccctgaacggagatctcatagtggtcctggaggttggtgccgacaccggggagatccttgatgaccttgataccgaacttctcgagttcctcggcgggtccgataccactcagcttgaggatctggggagagttgtatactccaccggcaacgatgacttcacgagaagcggtggcggaaccgggggtaccagaaacagcggagttcgacagaggactggccctgtagaggtgctcgccatcgaggaactccacaccggtggcacggggtggggtttcggtctcattgaaggtcaccttggtgacgtgggtgttcatgcggacatcaagagggtacttcttagagccatcgtcattcgtagcatcgcgtacagagatgatgaattcacgggcaccattgcggtgagcgtcgtcggtggagatagggatctggtagtaaccgggctcggtgtcacgggtctccgtgtcagcattggcatcgccaactagcagagtgccaaggttcataacttgatcggtcgtgttaccgagcgcaaaggcaccaccggtgagcaagctcagcaactgggtatcctctaagacaatgctgaggggcgcggtttcggtcgacaaccagccgtcgtaaccgtggccctcaactgcgggaagagagtaaccgttgttctccagcttagtgaagtacttgcgcatattgtcgggtgcccaagagctatcgttggtgatagtctgaatgtattcaaagtcagactggtaaggatagactgcaatcaaagcgttgtgggcagtgcaaccaccgagggtacctgtacgagggtagagggttcccttcaaggtcgagccctcgggagggttgaggccagtgtatatcccgccatcgggcgtatcatagctagtcttccaatcgcgagcctgacgctcgtcatcttcgtagtggtggacgaaaaagttccacgaaagcttctcgtcttcggaggctctggcggagtaggcagggatggtgtagttgtaggtttcaccctggtcatcaccagcctcaatgagcagtgtcttgtgaccagccaaagcaagtcgggctgccagaggaccaccaccagcaccggaaccgacaatgacatattcataaccggtgagttccacagccttggccacgccggacgtggcgaccagcaggccaaagatataagcaagaatcatattgacaaagaaggactttgagtgacttgaccttgcagaagagatatcacccagcttttatgcatggggtttcccctgaacaacggggatggttcacgtcgttctccatttttatcaaagccgttgaatacttggcgtgcctcggtctccactagctcatggtgatctacacggagacagctgagcctagtacttttctaggacaattcccgaacgatcatcagtagtttaatgcgtaaaccttacatcgatgcagatcatcaagacggatccacatgtttcgggggtttctcctttccagaacgaagcatcactagcagttcgctattgccgagacagtgcggataatttttctcaaagctgagacattttaatccctgccatctggatgctcaataccatgttaatccatgtcatttggaggctcaatatgttaagtggcaggctttcatcaaaagggggaagtcaattcaagattctatacgaggtagatcagagagaggagcaggcacccaaaatggcaaaagagggaaaaccccacatctgcaaagaatgcaaacatcgagtgataatcctctgccgaggcagatgacaagacatgctctaccgagtccaccttggccaaccccaccaggactaagaaatggccgccaaaagctcgttaggccatgcatgttcgctcgtattattccgaagaagaccggtttgatcaacggagaaagaaagcagagtatctgacataggcttgcgcctgtactccgtactgtgcggaaagagagcgtaggcggtgtggtcatcggaggccttagctacttccggctagatcaatatgactgtcgctccgcaaatgttgaagggtcaattattgcgaaaaaaggatcgactgtcaactgtgggatgtattgaatcgacagtaatgggagtgatcccccggaagatgtgcgtgatatgcacataaaaagatgtccaaagatgcgacaagcatgaccaaacggcgttcggtgcccaggaagaaagggaattgccttccttagccagcgacactgcttacgctggcggtcggtaggatcgctgacactacggagtagacccgcagttatttaatggcaaacttagtggggaaaagaagatcagaacgatgaatatgggtaaaaggagatttatctcgccaaaggcagacctcaggcagttacagaaattcatcatgaactgaaggggtggaagcgtatttagaaacactttcgtcttagttttgaggcaagctttacgtcaatcacctgatcaaataataggtatcaatgacgtagggaaggatgtagtctgctctatctactatgggatgtaggatactgtaagggggaaggagactggagaagaatatgagcttgcgttggcttcaccaaaaggctactagtcaacagcaccacggagaggtccaagctcgtggctgttggatcccctgggagcatactgctgtcccaggagaccccggtcttcccagaagacctagcagaatctgggttggcatctgatcggctgcgtgtcgaggtggtcggcactgcagactcacgtctagcagaatctgggttggcatctgatcggctgcgtgtcgaggtggtcggcactgcagactcacgtctagcagaatctgggttggcatctgatcggctgcgtgtcgaggtggtcggcactgcagactcacgtctagcagaatctgggttggcatctgatcggctgcgtgtcgaggtggtcggcactgcagactcacgtctagcagaatctgggttggcatctgatcggctgcgtgtcgaggtggtcggcactgcagactcacgtctagcagaatctgggttggcatctgatcggctgcgtgtcgaggtggtcggcactgcagactcacgtctagcagaatctgggttggcatctgatcggctgcgtgtcgaggtggtcggcactgcggactcacgtctagcagaatctgggctggcgtctggtcggcaggatggttgtaggaagaagaaaagggagaaaagaagggggggaagagcgccccttatatattggcttgcggcctcaggtagcactcgtggaccaaggatagaaaacggaagatttgagtttcaccttcccaaaacgtactagtagctactttattgaaggttaaatccactgcaactacggagtagtagttagggtttactatcggagctgtacactttagagggttgctctggctctattacttttgtttgggaataaattcactcataatactggaggtctatagctgtaccataatttgaagattcagtcatcaatactagaagaaaagaagaaacaacgttgggtactgagatttgttcataaccaccctgtaatatgtgggtacagtgttgcctcactttccttggagatatactgttctactccccggcttcagtggccatgtcctgcggtccccatccacttggtcaataatcggagtggatcattagttggagttaaatctacttctaggctttgatttatgttttactgcaaacctacttcatgcatttgatggtgttccatattcccatacggagtcggacacacgttgacaagttggcaattcgctcgtacaacatagagtccgagtggcgcaacaccgcaatgattggattcgaccgtgtctgcctcgatattcgagatatatgaggtcacacgtggaagatggacacatcgctcgaagtctagagcaacatcggaaccttggaagctcccctatgggtaaccatccggatgacttgctggtcttggaacgaattattttgctacattgactacgcaggtaaattccccgacggcagatatggaccggtctgctagatttaatttgtaaaagaaatagatagttggaaggcatcgctatcctacttccaaattttctcccccgcaaccaaatcaaagctccgctcgtctggatgctttttcttttctttttaatactggtggtgttaatgagagaaagcaaattattgatatgtcaggatctcaacctaactgtacccccgcgtgcaaacttttttgctctttggttctcagatatcgaggccctttgaaagtgtaaggtaaaaaagcccgtggccgaatccaggcacgggttatcctggggctaatgcctcgggcagaccgtcaagcctaaataaagtaagacatgcccttctccactttccttctctcctccagccagtttcatcaagcattttcaacaacactttcttttcaatatggaacctcttgatgaccagaacattttttccgagttcgaagatgaggagagaaggcagctcatcgaggagctgatacgtcaggaccctagactagcggaactcccgcgtacgaacttttttactctttggttctcggatattgaagtccttcgggtgtttgccaacgtgcttcagaggggtgatcccaatttcaaatggcgaaaatatcttttgtccacccccgacccaagtgatgtacctggagtctgtaagtgcatcatcgtgcatcagaaaatgcctctgtggtaacaagacaataagctaaaaattgatatacaaaacagtcgcatcaagtaagcaggccaataagtcgtcctcgaaaggcaaatcttcctccgggtctagattgcctgtaccagctcaaagccccgcgggcaggactcgctccacgtctcctcgaaagggccagccgggtctccgcgagcgttcgattaacacgccacgtacttcttgggatgaccagcaaaaccccctcggtgaatcgtcaacttccgttcagcaaagcccctcccttggtcaggatttgactttggttcatccagaaagacaaaggcgagacgacgctatgaagaagaagatactctgatcgagaacattgagacaggataatgctaacttccttgccctttagtgcctggagcgagatagtaacaggtgcatcataaccaagcgcgatcaccccgggattcagtgtgcccatatcattccctacaaattgaacggttccagcacccggggtgcaacctgggaatggctcgaaaatttctggggtgaggctcgcgccgacaggtggaaggctgagctcctcggtggctcaaatcaccagatcaataccgaacaggtcaagaacataactactgggataattgcctgtatgctttccgccacttgagaacttacgagcaggacacgaaagtggacattgcgttccattggttgcctcttcgcgggagtgagaagcgaaccgacattatccccactatgtcccatccattccctaatcaaccccaaggatatgccacatctccaggtggcaacagatagttgttgcattgtgaatctttgaaccttatctcccccggacacattttcactgtgacaaccacaaacccagtgactcatccacttccatcggaggagttattgaaaatgcaatggatcctgagtcgcatcgctagtagctggtgaagacgaggacagcgaccttgactccgatgatgattccgtcgcttttacttcccgctcgagatctccgaacccactgagcaattgaagctcagagcaaggagctcgtatactctctgagaacatgcctttcattaaagccactagttagttaccgagtatgttgactaagagctttcctcgttccatcgcccaagttgaaagtatggctagataacgcatttctcacgtcaatatcggtcatccaccaagactgtggtctttagaactactcctgttgaaggagaaaggaaaagtggagtgagagtgagagtgaagtgaaagtgagagagaaacgagagatgtctagttagagcgaaatagcagtccacaaaacacggttgtttatgagcccggtgcattaggtctaccttaataatatgcgaaagatgacagtaaaaaacgtgatggtaagattggaagagctagtatttcaagagaagctacacgaatgagcttgcgttggctttaccggaaaggctactagtcaatagcaccgcatagaggtccaagctcgtggctattggatcttctgcccagggatatgacacatctccaggtggcaacagatatctcttgcattacgaaacgctgacctgaaacttgtatcctccaggcaaactttcaccgtgacaaccacagacccagtgactcgtccacttccaacagaggaatggttggaaatttaggacagcgactttgactcctacgataataccgtagccgttacttctggctcaatatctccaaccaaggaggcactaacatgacttgcttcggggaacgaccgacctttgcaccctctcgatgaaacacaactgaccaaaacatggctaaaccagatgccgatcgtgaggcaatgccacccgctcaaatttcccctggacaattgaacctcgggtctccaataggatccccgagcaagggacccctgctgctctgtccatatcctccttacaactttcaactgcggcgctataggtctaattttgccctccttggcgctatgctaggactccaccgccgcggaatggacgaccaccgtaaactcggtcagatggccgtgaagaagcatgggacgtttgtctcctctccacccgcccgaccgaaactcaaatcggccgtcgtaagaagaccctaaaacccgcgcctctgaagcaccgacgccgtacctctgactcgcaatgatatgtcccctttcccttttgctgttttgcactcgttttctgctctggtccgtctgaacccgcatatccacctatttggtatttggcacttgagcttgtacaacttatgctgtgagacgggatctagttgaaaatataaaaagagcctctagtcccaattttctattctatcttattcgcagtatttattagtagtgtaaataattgacttatttatatgcacctgtatttctatgattctgtgaaactcctccgtcgtgacaaggacatcggattcttcttgtgccaggactctatcgtacagagtatggaattgtaagacaagaagatctccggcaattgcttgctgtgcgatgttgatttcctgggcacaatatggctgctggaaagtaggaatctgagggtatagcagcctgcttatttgatgcgactgctttgtatgtcaattgtcagcttgttatcatattgtcacggaggcacttgctgatgcacgatgtacttacagattccaggtatatcacccctctggagcacgcttgtaagttgccgcaggacttcgatatctgagacccaaagagggaaaaagcttgaacgcgggatttcagcgagactgaggtcctggcatatcaactccttaatgagcttcttcttctcctcctcttcaaactcggaaaactgttcttatcatcacctccatattgaaaaggataccaagtgatcttcctgaaacggatgaaaagggaaagtggagaatagcgggtcttgcctcagccttcacgtctgcctgaggcatccgccccacaaaaaccgttgcctggattcgaccacggacatgatctcctacttaacccgacgcccaacctatcagcgcatatggttgtgtagttagttctttgttttcgtgctatttgggctctcagccctcttatactcaacaaatagaactctgttgatcatgttctggatatccgtagggacaatgttggcacgagcccgcgagggttcacgtatggttctctttcgataccatagtcctcttgcagggggagatcagagcgcagaatctgagtccatgaatggtcgattctatcctcttttcatcggccagaatgaaaagattgccaagtgatcttggcgaaactgttgggagctgaaggagtggagaagagcgggtctctggctactacctgcttcgggcagggccagaacagccgatgtttctcgtatgttgtatggacttttagatatcttctttcgggtattcggaattagccgtaaaataaaacggggagaaaacagtggatggggattggcttataattcggtcctcttatcactccgagagcttgacgcttgtaatgtatataaagtaatagagaagtgagagtgagagtaagagtgaagtaagagtgaagtaagagtgagagtgagagtgagagaggaaagagggatgtacttagacgaaatgcagtccataaaacacggttgttcgtgagcccggtgcgttaggtccacctccgatataactgggaataccagtgcagcattcaggcctcggcctcatcgaccgataccgtatcttatacggagtacagccaatcataacttactcggccgtacagcgcggaatgtcacagatcataagatccaaccctaaccctatcactcgactacaggatacaacagttcatcgacgaaagcagcattggtatattgtaatttcaagaaaatagacaaaggaaatagttgatagcattagatattattacaaccctttagctggcccaacaatagtcgtagagacttggtatgacgcatagtgtgagcgcccatcttgcgactgatcattcaacgacaatccatccgccgaccctggtatttgatccagtcgcgtgagggggaattcactatcctcctcatccatgccatgcccccgttttactgtactgttcttgctcaggctggtaggtcctcctgtgaacggttgcgacgagtatccatcatgactgccaaacaaggacgggaaagcagccttgagaattggacggagcatgggcgcgcaggcatttccaatggcaagagcaggctctgtaacactccagaaggcagcccagatcatcgagtaagacagatcggtgaaatcaaccgtggtgaggacacggatacggatgatggtgatggaggaaatactatgatactcgttagaactttgctttgcgatggcgaacctggggggaggagaaagcttacaaggcacccaatccaaagatcccaaccaatcccatcttagtcgcaaccgacatattcaggttccagacaaagcgaactggcaacgccacgatgatcatatcggtgatcaggttaaaggctccaatcgtcgaaaatgccacgttctgattcgcgcagtggcccggcagagtaggattccagttcctcgcaaagggtgtgcagatcaagaaaacctgcagcatactcccaacccagtatgcggccgaaaagcctatacaggtccacgtcaggatgcggaattccctggacacaaagatccgcaagtagaaggctaggtaggagaacttcgccaggaccatggcattgtagtagacgatctggtagaccatgagcatcttagcgatcactacagcattctctgagggaatctccgtgatgtggtatcgcatccccacccgagcgtagtggtactgcattgcgagcatgccatatgtgtggaatagtcctgcaacgcagaatgcatcatcccatcctgcaccggtttttcggagtcggcgggagacaccacgcaatatcacgagtagggttgcgattgcgacgaggaccgtgttagcgatgagctgatcgcgcacgatggggaagccaaagacattgtataactgcattttcccattaactcatccgttttcggtttttggtgtgctgtacaacatgtacacttggggcatatatggttgcaaagggtgaaggatctttaagagccgtgaagaactgtcagtcgccgggtaacagcaacattgtctccgtcaattgtacaaagtactatgcactacggtttcaaactagccactcattggcctgtcaaggtgatcagcaggagattatggagccgttatggcgggccgttttattttaacccaaattaatttcccagagtggacttgcagagagaataaagtggctgtcattggaacgaatgtcaacctagttagggccaagccaaacttgtaaagactatttctcctattatgtccatgggcttcggctattaacaaataacggcctcggtacactccacccccgtacacctccttgtttctaggggcactaacttcactgaggtaaataacgtcgggaacaatttacggagtatgagctagtaacagccaccaagccgacgggatacgaaaccctagaaatgccgcgtggacttttttatctgctggcagtcgattgtccgactctcgatcttaaatatttctattattgtcatttcccctccatactggaaaaagattcaagtttttttaactagttacttacaacatggatgactacgactatatcatcatcggcgctggaatcggcggtcttgttctggcaaaccgtctaagcgaggatccctccgtcagtgtcctgctcattgaagctggcgccaatcggatgggagatccgcgtattgatacgcctggattgatggctaccatgtatggtaacccggactttgactgggattacatgagtattccgcaggtatgcccgtcttaaacatcgccttctcggatgaaaacctgattaatgaaaaggtccatgtgaaaaaccgacagatcggtcagccccgcggtcgggtcgtcggcggctcttccgcattgaacttttccgctattgtgtaccctgccgcgtcgaattttgacgcgtggaaggcgctaggaaatgacggttggagtgccaaggatatggccccctatcttcgaaagttccactcgtatgtcgcccctagcgaggccactgccgaactactcggcacaagccggtacatgcaactcgagaaccaaggatcgaatggtcctcttcctgtaacttacccagatatatatgggccattccacaaggcctggaatgagacatttgcgcaattgggctgggaaaccgatgccgaccctattgatggccacaaactcggcgcttttacttccccgataagcgtcgatgtcaagacgggtaaaagagggtatgcagcggcatactactcccccgaggtcgcggcgcggccaaacctacggcttcttgcagagacaatggtcgagcgaattatcctctcccaacaggagggagatgtcgttgccactggtgtgcaggtcaagactcaggacagttcatacgagatcaaggcaaagaaggaagtgatcgtctgcgcaggcagcctgaattcccctcaggtgctcgagctctcgggtatcggcggtgcagatcttctccagacccacggcatcccggtgatcatcgacaaccccgccgtgggcgagaatcttcaagatcacagtatcgcgagcgtcaactttgagatcgccgatggccagatctcgggcgatatcatgcgtgatcccaacgtcgtacaggcagtcatgaagctctacgaggagacgcgcggaggcccgctaaccggcatacctctcaacatggcctatctcccgctagtagatggaaccggcgtcgtgccgaaagaagaactcgacgccctgctctcgaaatacctcgacaacgacagcacaccagctagcctgcaagcgcaatattctcaaatccgcagtatactcctcgaccggaacgagaactccacgcactacctcttcctccctgcccagctcaacgggaaaccagaccaaacaaccatcaccgacgtgctggccaaagttcacccggagaactacatttccatcatggtgctgcacaaccacccgttctcacgcggctcggtccacattgcctccggcaagagtgaagataagcccacctacgacccaaacctgctctctcacccgcttgatctggagatcatggcccggcaggtgcagtacatggggcgcgtttccgagactgctccactctctggtctgctcaaatccggcaagcgcatgcctcagagtgccatcgatttgagtgatctggaccatgtgaaggatgtcgttcaggatctcttgttcacgtgtttccatcctgtgggctcgtgtgccatgctgccgagggagcttggcggcgttgttgattctgagctcagggtttatggcaccaagaacgtgagggttgttgatgccagtattttcccgcttgagatcgctggaaatatccaggctactgtttatgcggttgcggagcacgcagcggatttgatcaaatcccagtagtcgggtttggggctttagattgcgtgacaactagatatgggacattacctctagttgtagatacctcctgataggacatgttcattctgcagattgtatctaggcaaatggagactatggttttacagcgcgaaagtctaaatgtttaacaacaagctaaggttacgaggccgaatgcgggtgggctcagtacctctgtactgagtgttactaagtatggatgattgattggttaaagaactaatgatagcgacagaaactggggttgcacaacccctccgaggtttctccgctgcatggcagaaggttttcacggttaggctcggtcggctcgggccggttactcgatcgataatctaaattagacagacaggtccagaaattgggggcgggatcagaggacccattttcggacatagactcaggtgactttgatattgtgaaaaactatgaacgagcagttttataggatgttcttcaagccactctcgggtttagtttcatccactctcccgatactaatcgacacttatcgacgcactggatgaatgtgattcggatgatgatatgcaactcatactctgattcacagctacaagatttagaggctctgcatgtgcgtgtgttattttcttgtccaggcctaaatcgccaattctccaagaactatcaacgatccccaatgaatacgaaggatcctttttgagattcccaaagcagtgatgacaacatcagagaatcaagtgtctaatggcaactatctcattccatagttgtctcccaacctttttcaggtataacatcaacccaataagcatatatttgttcttagagcaccgactttttgctgtgtggatggaccccccaccccttgcctaccgattggtttgggaacgctaattttcaatagctaactagtgtgtccgtgcgatcgtccgtgtgattgcttaaatttgttgctacataccacataccgtatacttgaagatctctattgagacctaaagcatagcctcgatgaggtatcgacacgtagaaatgatacatctaatgtaccttcctgtgctcgagaggttatcggcaaatgaggcgggacacagctaaaagcaaatggctcatcaattttagcaggtgatccaatcgtggtactaagacccattcatctcgcttgtaaaccttattttattggcctccctcggagtcttgtcaatctcagactaatctcactacatttgggtcaagtgatcagaatttgccggtctttttgatccaaaaacgcactcaatagaatctactctatcagactctgatcctgcctctatcgtattatcattggagaactacatgggcttttctgcagtatggcaataagataacctcatacattcggccgttaagatatagctcatgcgacatttatctggttgttcctttctttccttgcccatctatgtatatcctctatctctcggacactgatgtagacttattgactcgcatatcattttcccctgctatataagctcttccacgcttccttctgcgctttcttcttctttcgcgaatttctccctttccttttttccaacataaattatccgtacaggtgccctctgatgtttatttttggttatttggctactcggacagcctttactagccagcacgaacactatactcgaaggctggcaattcgatgacaaccccgatcaacatggtagatatgcttctctagaatcctcgcctgcaactgagccattctctctgtcgacgtcgtaccacgcagctatagtgtagtttgagaaataccgttaagatctttccatggccgagaaccgtgctttgtccctggtggcatggttacttgctctggtttccatgatgaagaccgatcgaagttcgatgtcctgtagggtatttacagttgtcacattctctggccgatgttcaatattgtgatgcgcgcgcttatgtgctgtccatagcccaatgatatggtgggttttgagggcgtgttgctagcatatatattctctctcacattggtagggactgtggggaaactcaaaatccacaaatgaattcccctacatgtatgatttggagtataataaattgaaatgaatatttattgatactaagatattcgacctgtaatgtaaaggaaaaaaataagtaaaaaaaagtaaaaaagaagtgataagagtgggattcgaacccacgcctcttgcgagaccaggaaactattgctagttatggagtcaaggtataccttaacctggcgccttagaccaactcggccatcttaccaatcgatgtaaggtcgacaaatatatgcctatatgaacggaaaataagacagatgtggatagtaccagagccagttgcttcaactgtctaacaatccgaagtcgatcgaaaatgaaaacttttttttatcagtctgggcttcgtgcccgaatattaaatctcgagtgccctttaagacttgccgtgggaatggctgtagagacacctagctcaataattatccacatttactctacaaagtttttttaggtagtatacatatagaaatcaagaaaacaccgcacgacaaattgttggagtgaagtatctgagattggttcacaaccaccttctcctttcaagttccagatcaaacgaaaagtggcaactccaggccggatttcctcgggtggggctttcctatttcagctgtgaactcatcaagtggcatgggcatatcgaactgtacttttcagtccgcctgacctttcatttaatcttctccgtacagggaaaccccatgccatggcttctcttgaccttgaaaaatctaccgggagcataacaaatgcccgaaaggggccagtgcatcggcagaggaatgttctcggcccccgagatcggaagcggacagctctgacgcaaggcgctttttattattagcacggccacaactttccatggctgggaacagactggtccactcccaaaagcaaactaatcagctgccacaggattcttccatatggctctttgcagtcacaggaaggtgggcacccttcaggggtggcggtttgaggccacatgatgtaatattcgcccagggcattttccaggatcagcggtcaaaaccagcggtgaccctctcaatctgatattcagccccaaacatttctttttttctcaagctccctcttccttcactccctctaatcacaatggcacctctaaagctcaacatcaagcacctggagcaaattgcgcaggcaggcaatgggccaatccaaatcccaaagcaccgtttccgcaacagctctgttaaagagggaatcgtccacgttggtgtgggtggcttccacagagctcacctggctgtctatgtcgaccagttgatggagaagcatggtgttaccgactacgcaatctgcggtgttggcttgcaacctttcgatgctaccatgcgcgatgtcctgagagagcaggaccacctctacaccgtcatggagcgctctgacaagggaagctttgcccacgttgttggatgcatcaattcctacctcttcgcccccgacgatcgcgaagctgtcatcgccaagatggcccaccctgatacccatattgtttcgctcaccatcaccgagagcggctactactataacgaaaactcccacgagctgctgagcaatcaccccgatatccagttcgacatcaagtccggcaacgagaacgccccgcgcacaaccttcggcttcctctacgcggccctcgcacgacgctacgaacaaggactcaagcccttcaccgtcatgtcctgcgataacatgcagaagaacggctccatcacacgcaacatgctcgtgtcctttgcgcgtttgcgcaaccctaagatcgcggagtggatttccgagaagggcgccttccccaacgccatggtcgaccgcatcacacctcagacatcagccaaggacaaggaggaactcgcggaggactttggaattcaggacgcatggcccgtcgtcacagagccctttatgcaatgggttatcgaggaccagttctgcgacggccgtccagaattcgagaaggttggtgtccaggttgtcaagaacgtccacgacgtcgagcagtttgagatgcacaagctccgtctgctcaacggcagccactcggccatcggctacccaggccagatggcaggctttgaatacgtccacgaagtcatgaagaacccgaacatgcgccagttggtgtgggagatgatgcaagaggaggtgaagcccctcttgccggatattcctggcgtcagcattgacgagtattgcaagacgctcatgaagcgtttctccaactccaaaattaaggatcagctgccccgcatctgcctcaatgcctctggcaagatcccgcagttcatcatgccgtcgattgccgaggcgattcgggagagcgacaagaagcagatcgaatatcctttccgccgcctgtgtttcgtcgcggcctcttggttcctttatgtcaaaggtgtcgatgaccacggcaagaagttcgaggttgatgaccccatgcgcgaagagctccaggctgctgctgaggccggccatggcggccccgaccagctgctcaacatcaagattctcttcggtgacgacttgcgcggatgcaagaggttcacggatgagatgaagaaggccatgacagacatcgcggacaagggtgtcttggaaaccctcaaggtctacttccctgaggacaccaactagtcgctgttggtttgacgaaaaagttacaattgcgtctgcgagcgttgtttttacattttctagcatgctatctaagaaaaaatacacatacagatagatggtagacaagacttgcctactactccgtatgtacttgtatattgaacggatttctttaattaggatgagttgttttctggattaatttggagaaacgtgcgaatttcggtggcgggtgatatagccagatctaaccaatgtgaatcttaatgttattacatccgatataaagagctcgggagcaactttccaggccttgtaggtggagtagaccgatggtcccgtgggtcagatgagcgtgctcaattttacattgaaaagagaagtggacacctgtaaaaaaggaaagtgacgacgtggtaaaaactggagcatatcatgcgcaggccaatgatggttcattcatgagctatcagaatgaactcagtgacaacatgaaatcattacattcatgtagccaatcaagaagtcgattgttatcgcgattaattgactggaagagctatatatattggaggctctcggaaaatctatacttattggtgtctggtacaaaatataagctacaggaagatttgttcaaatattcaacaatgggattttgaagtatccgggataatagaacacccgctagcagtttaaaaaaggagtatgtatgaacaatgttacaaaaaaagccaacctcataaatccaacacataggtgaatataaggcagcgagtacaacgaaagacaaatccaaatcatgaatacgcaaactcaagtttacagcataaccatgaagataccagaggcaacggcagcgaccgcataggcaccggcctgccaggcaccaatgtgcacagcatggggaacggtgccagcagcaataccagaggaggtagcaccactagtagaagagccagaagagccagagccagaagcaccagcagcagtgctagcagcgagaccagcactgacggcgccagtaccagccgagccagcagagctcatctgagtagcgcaggagccagaggcagaggtagacttcttggtgctagcgacaccgttgaagccacaagcgtcgctaccagccttggccttgttcttctggtagtaaacgttcatagcccaagccagctgctgcttaggcgagcacatggagtaggcaccgtaagtgccagaagtggagttggactggactccgtccatgacaccgctctcgccgccgaggtagccgaaggtggttccgatctgcttgtcggtgatgtcggagttggggacacactcgagggagttgtacatgcactcgcagaggtctgcgttgggcgaggggggcagcttgctggcggcgttccagtccgagccgatggtgggacagctgcgaccgacggtcgtggagacggagtacttgtcggagttcacgccggtcggggtggcagaggccatttgcttggagaggtagctgaagtctgagagggtcgatacgtcgtcgccggagacggtgacgaggccgtacttgttggcttcttcgtagtacatgtagacgatgccgccggaccagacgtcggtcatctggtcgccgaacaggacggggacgtcggtgaacttgcgagggcggacttcgttgcagccgtactcggagaagaaggcggggacggggtagtcggcgaattccttggtgcgatcggcgtagccggacttctggtagctggagtcgccgcaccactcgtagatgttgtagccgaagaagtcgatggagtcggcagcttcgtcacagacgaggtagttggtgatgtcttcacggacggtggcatcgtcgtcggtggcgtagccaacgccgagggagctacggtagttcttttgcttgatgtaggacttcatgtcacggacggcggccttgacgtaggccatggaattggtgttgttgaccttgttggagacttcgtttccggcaaagaagccaatgacattggggtacttggcgaaggcatcaacaacctgggagtagcgagtgaagagatccgagttccaggtcgggtcgtcggattggatggattcgctaggcgaggacagatcggtgatcaaatagataccggcatcggcgagggcagtcatacactcatcgtggtctttgctggggtcgacagcgtatgtacggacaacgttggtgcgcaattggacgaggtagggaatatcacgcttgcaggtgtcgatggccagcgggtcggtgtaggtatcggtgctgtcagcaccgttgcgacccgtgaagttgggctggtaagcgacaccacggatgaagaactcggtgccgttgttggagtagaagaatttcttgcccttgatctcaatcgagggaacatcggccgccatggccgctcccagaagggagagaccagcgatgatagaggccttcattgcgcaaaggaaatcgaaatcctaaggaatgtcagacggggtacacaccgtctttcgagatagcgaatgtaaataagtgaaagaaagaaagaatcagaaatctacaagatatgtaggaagggaggagaagaaaagagagaccctggaagggggaagagggtctaaagggggacgcgaatttatgtggagatatccagtgcatatcatttgtacaacgctgtattgatttctatttataccggatttttggtttttggtaactccagtggcagacgtgattggcaatccagagacaaacaaaccttggaagtggaagatgttgatatttcgtcattggccccttctactccctgcctccgctgtccctgcactgtgtctccactgggactccactgtcaccccactatttcctcggttaagcctttcccgttgagtccttttgcttatttgccacttcccctgagacatgtggaggcgctagtgagcccgtggacgggctgatgctgcgctaaagaccctgggaagaccctgactggaggacagtgtgggacttcattttctggtaatctattggaaagtcaattgtttacagaatactccatcgttgaacatctacggaatacacagacaatattgtatagaagagagattcaaagaagaaagcttgttcattgccaagggcgatcaatgcaatgacgtcgattggaatgaatccgagcatccttggctaaggcttgaccattgtaatacgtagcacttgaaatcggaaatatcaggattaataaactgtaatccccgtctcaaattggtctagccttggtgatggtagagtacatgtctctgaaggtacggagtacttctggggcatttcgggctaatatttgtcttgaaacatgtctctaatttatgatacatgctcttggaccggacaatactataatttaccattgtacagcagctaaacatcttatgttatgtatatgatacaattgagtaacattctattgtttcatattaactagggccaaaccatctatatcataacattcgatgttttctttttctttttctctatacttttactatacaataacagtagagagatgcttgtataaaaaataccatgtatccccatacttatacccaacaagccaatgcccgggaaatttgtccagaaaatgtctcggactgataatgaagcaaagagcccaccgagactccatactaagcgggatattaggccgccacaaagcttggtaaagtaaaatatgcactctgtactccatatatgccccgaaagggagatgattgactttctcgtagcccgtacctacggagttatatgcttggacccgcttttggcgtgatctatgatattcaggggtgcatatacccctgaaatgcactgcctggttctgtctcgaaccgcatggtttgcgttgcgctgcatgttgggtcatttcataaatatcctagttgataatcatccccatgtagaagagggctgtgctaacctaacgggaggaaatattactgcctgctgtgccgtcaggcaaaattctctcattcttacattgaaaagccaacttaaataatcatttcctcatccctgcgctaggcagacagaaaaaaaaagctcaactagcagcagaaaagaagggttctcgtcaatggcatcctgaatgttgatggagggattcgtggcgttttagatgataggaccgattgtctcgcagagggattagttgaaccacttgaccgtaacggcgatgcccttgcagcaccatatatgccatattattggcaatggttgcccagccatcccggcaaactgtatatgcggcaacagaccatttgccagcattgcttagccgaacagtgcctatctgttaggacaccccacacgataactattccaaaatattgttagtaggggacgcttggtacgttatatctcgacttccaagagattacatacgtatatgtatataaatgttggtccatggcagctggttgaccttctgacgaaaacccagtggacccaaaccctcttcaggcccaaggggaggcttcttaatgaaatcttatagtcggatcgtgtcgatatcgggcgaatttgagagtttatgaagtcggcccttctagcttttccaagcctttggatattcgccaacggttgcattttgagtctttatgaaaaaagagaggaaagggctggtttctgattgcagggtatgattgctctctaattacatggcatagaaagctcctccatgtgcactacacatattgtttaatccgagttctcatatctgacaagatctgaactctggcagcattacccttcaccgatacagtctcaaccgtggctccatagtcattcaacactgtcctccacgcattatgaagaaacgggcttcaaggccaactaccgtcatgccataaacagagctattttgggctcgcagtcccccataaagcagtagatgagtgttcgcaatgagggaaaaaagactgttggtccaagtagaagatgaaaatcccgaacttttgactttcatcactattagtgttggccgacagttcaaattggacacaactttgttgagcataccagttcaatatgtaccggacaccgataacgcaccccacactacagcaaaaggcgctgagagatagacgtcattcctcaagtccagaatacttttctttgcaggtcggtatgctcgggcagtactgtggcaaagctcacatccccacaatctctaacggttgacgaaggtatctggccaagagaagaagtgtgatcaaccagaaagatgatgatatgaagtggatggaagatgacgatctagctattccatgaagctctttatatagctccatagtgtatctgatccatttggttaaacaatgtcaaagtccgacgtagaaccgagagaacctgaaagtcacatggcccaaaatggctagcgcgaggtaggcagcaactattttaagggcccttaagatgccgagaacccatagggctgaacttttctcttttctgagaatttgtatgttgtacttactccgtacagacgacggcattatcatttgattcgaggttgacttcattgactccccttttactctgactttgcttctcactctccctcgcttcacttcagcaaccgcccgaccgcagagcttacagcacagacaccaaccaacaaactgaaaaggtgacagccaactacgtcgcaacgcagctgattgagctgagtggtcatggatattccctcgggatgacgacagccataacttttgagacgagcccaagccgccaacatccgcagtacctgcccgagcagggcctagttgatcattgatcacggcctcatcacgaagaggctgcctataacaaatgccaatatagacactgcctaatgatagtattacaatctattcttgggagcgtacctcctctcagagtatctccaaggctcccggctgagagcacgggagcctgcccaggtggcgctgctgagcgcttctacgggcaccaaccaacaaccaacaaccccgaaaaccaaaccttgacaaccaacacgtgatcgttccaatatgcgtctggcttgacctcgggacgcaatcaatgacataggaaaaggggttgtggcgtccaggcctgatgtggaatcaacacgcgagctgattgaccaaacactgccaagagcgggtcaaaaccccctacacaatttatgctggagggaatttcccccaataaacaggagacccatatctgccgctttctgtgccacgatcgtaccgctactttgtatatcgtctaccaacatctgcaggaatgcccgagaaaatttatcagatgcagtgtgaccatggtatttgactgcagaatgccggcgatcaaccaagtttttgccaagtcacccaagcacaaagcttccaccgacaaagctttcagttccacctggccaaggtttcaagtggcgctgtagtttttgactgccagcgcaccaacatccatgatttgacgatatctgacgcagtcgtgcgcaacaagaatttataaagtggaattgaaacactgactggtccccaactaccaactatccatacaaaccaatctcgcgatccgagtttgtttttttctagacgccaagatcacaatatttgctccactatacacactatacgcaccacttgtggctgtgcctttcaactcttttcgaagtctgttctccaaagaaaccccagcaaattgctacagacaaattctatcccttcatttctgagtcactccttttacccttcttctcgctgtaatcgtttcataattgtcattcgtttgatctttgttgacttcccgcctaccccttgcctgagcgcgactctcaccgttgcgactctcaccgttcccctgtgcgcgtgaatatcccggatccgccattcatcatcgtgctgtggctgtatcttgagacacgtccacatttcgcgcttagattgccgtaatcgcttcagcttgtggatttgttgagctgtccatatctcgaaaccgttagccagtgcgtgttcccccagccagcccttcataggcatccgtcacaggtcgcaggtccaagccacagttgtggggtgttttccccttgaggcaaattcaagctcatcaagctcatcattagcctctgctctgttctcttatatatatctctcgcaaggccactcttacttacgaatccatttctctacagaagccatattaagccaccaccatcatgcgtaagtccaacagctatgcatacccaatctatcaactggccagccatactaaacgtaccactagtcaaaattcgcagtaaagcccacttcgcagcacgttacggtcagaaaagagccagccgatcgaactctttgcagctcgaggatggactatcccattcccagaccttgggcgaactctcagcagaccagcaacgccgacgggaactcaacgacggcattagcgtcccagagtactccaacacattcccgccggagttcgctggtagcgaccatgaaacacacaagtccccgcctgaaccgtccatggctagccaggacccaatcaatgtctcatcgtcacgcgggcttgataccgagaccgttggatcggcgcaggcgcgccagcggaaaagtggaatcttgggcaagttcaagcatcgccatgatgacgacgagtgggaggacaagaagtcggagcatcagacctacacttttgcgtcacagataagggctactcttttgaactcgtgggtcaatgttcttttgattgccgcacctgttggaagtatgtcttgctcctgccactgatgtatggaagtgcacgtgctaattctgttcttgcgcatagttattctctatgctgttaaagccaattcgattgcagttttcgtggttaacttcatcgctatcatgtgagtggttatgccgctggctaggacgaggatatcttgctaacaggcatttactagccctcttgctgccatgctcagtttcgcaactgaagaaattgcccttcggtatgcttcaatctaccccattctgtttggtctatgctcatctcttctagcacaggtgaaacaatcggtggtctgctgaatgcctcgtttggtaatgccgtcgagctgatcgttgcaattatcgcgctggtccaaggcaaaactctcatcgtgcagacctcgcttatcggaagtatattgtctaacctgctcctggtgctgggcatgtgctttttcttcggtggtatccctcgcatcgagcaaaatttcaacgtcacagttgcgcagacagccgcaagtatgctcgcactggctgttagcagtttgatcatccctactgcctaccacaagtggtctgatcgttagtgcatccaggacccgcaaactgagacgagagctaacaagaactttgactatagttgacaaagttgacgggaccgcctctctatctagaggtacgttacttcctgggactactagccctgctatcgctttcacttttgttactcacaccgcaccacaggcaccagcgtcctccttctaatcgtctacggctgctatctcttcttccaactgaagtcacatgccgacatttacaaccaacccagcctgaaggtcgaacggcgacacatgaaagtcggcgaaggtgataccagccggggcattgcccagatcggcaaaatgaccgccacgccgttagtcgcacataatcccgaacaaatgcagatggaggatcccgaagatgaaaccgaggagccgcagctgtccatttcaactgccgtcatcacgctgattatctccactgcgtttgttgctgcctgtgctgagttcatggtatgcatatgcctttcccctagatctgttccgatctttattaagtgtgattgcagtaagctcattaatctatgcaggttgaatccatcgatgctttgacggctaccggtaacattcgcgagacgttcgtcggattaatccttctgcctatcgttggtaatgcggctgagcacgttactgcggtgacagtcgcatgcaaggataagatggatcttgcgattggtgtcgccgtcggatccagcatgcagattgcgctgcttgtgttgccgttgattgttgttctcggatggatcattggtgttgaggatatggtatggagcccaaaatttagatcttatcgggcctggcactaacttcgacagactctcaactttgatggattccaggttattgtactattcatgtctgttcttttggtacgtggatttgattctcaagaaagtgataccgtactgactgttcttgttaggtcaactacctcatcggtgacggcaagtctcactggcttgagggtgtcttgttgatgatgatgtatctgattattgctcttgcgtcttggtatgttcttgttctatatggttgacaagtggaatctgtcgcttactgattgcgtctctaggttcttcgtttaaacacttacactcattacagtcatcgggctgggtccccgttgacgatacgatatattataatttaccatcctaatcgcggggacctttttggttattatcttttctctatcacatttttatttggttttatttggttttatttggctttggattctattatgatcgcccataatatacccactctcgcggtgctttgcatgtccgacgcatttaatttatttccccgagataaaattgatctgtgattccataacagtctttcacaataatccacatcacaaaaatcaaaccaaataaatagccggacaagagctattcaaccgcctacgttgtcaggctaaaaaagcagggctgactaattcggtaacttttccccgaagagtggggatgagcagcgctttcgggactgaatctccgacaaattcagactcagcacacgaaatacgcccgtggacgaataaacagaatgcaattatgccaacagcacagtacggtacggagtatgtcctccgtacatccaggcacgatactgtagccatcggggaattaccgggctgaacaatcatgcacggtaaggctatccaaatccggactcggcagactcggtatccccccgatgtttctaaccgagccgatgtggggaggctgggatttacaattgttcctggcttgttcttcgaacccttcccatttttactgcggagttctccgtacggagggagtacaaagtagtggtcctgggatcccgcatctgcccgggcctggactgaggtttctttcgaagcacctcgccgtaaattaccacatgtggctattatcctaactggtatgtatgttgtatgtatgttgtagagaattccgtatgtcatgatatgatatcgaataatcagtacaaactacctgccgaatcagatggggtcggcaactgctccgcgccgagaagggacagggaggaaaagaggacttgatcccggacggaaattgttgggacgaaatgaaattcaaagccactttggcgctggaggcttcgacactgccgattggattggacggtagtccggcggcacgggatgcctcggataatatgaggaaggttaggagtttcctttattaatcttgtcacctgagaggctactccatatgtggggtagagaacccggatcgtgaaaggactgtgcagaggcagttagggtagggcatgcaatgttaatccagtcctccgtagttactccgttccgtatgtgatggaacatgttcaatttgccttttaggcttccccactgttatccaccggggtacggaggacaatataagaaccaaaggccggaaaaatataggcagatggccattgaccccgagtctctcttgtaaagttactatacaatacaagtccaagtctacgtcactataatatatcgattataaaaaaaagaacagacccaacttcttacctaatacaaagtaaatgcggggttatccggggtccaatggctggcgcctcggaggttgcggtccaatcgcggtatcggacggggccgaaatgtgaccggggggaaaaattcggtgtatgaacttttccgatgtgtgacgttcctgggcatgtgtataacctcggaactacacaattatggatttggcactccgcaagggacgaaaaataaaaacatatgatcgcggatgcagtcggcctcggactgtttgcacttgtacatggatgggaccaaattgtgggagtataaggatggcagcagaaatacggggcaaggactggtcgagtcaggccaattccccatcccgtgaaatatgcgtgttcttccgaggggatggcgattcatttgaccctctgccgagcgacctgatcgcttctccgattcttccactttgtgacgggtgacaagcggggggaaacacaagcccacattgtaggaatgtcacacggaggcgtcgaatacggggtgagaaggtgaaaggtcatagccaacgccaatcaatgcagaggtaactgtacttggaggatctagcatctcacctctttgcggggagagccccgaccaggcacttggagaccgttgattggatgccatttccccttcatccccagattgatgggctgcgtggatggacggccatccatgttctggggacgaggctatacccgagggatccaaatgggccgagatacccctcatgagagagacgagaaaaaccatgtgggagaaaaaaccgccttatgggtccactggtcttctgggcgtcttgtggagtcgcgtttcggcttttcattcttttcccatgaacaattcttggttctcgctgtactctccgagaatggccccccatctgtgcacacacacagactaggtatgtatatccgcttgcctatttaggtgttcccggtgcgggaagagacggtgtatggatttcccgcccagacaaatgccgatcggacatcagctgccacggggtagacctggtcaattgcctaggcagaggcgaatggtacttttgtgctccgtgccctagtatagagttctagggcggccatggaaccagggtgtaccgcattgtacgtatgatgcgcccaaatccaccgatcccccagatttaggcactgtgactgatccctcacgggccctagaaaatgccggaaagtggcggaggagaatcggccggcgagtggacgggtattgtcattccagccagtccgggtgctttggatctggatttggtccggtagaagagacaatgtcctacttgacaggccagattgccaatttttgatttttcttttcttattttcggaccgtgagctgagcccgagtcgggtagagatgtgaaatgacgatcatgagatcagagcctggtaagaatggggtagataccgctcaggcctcaggtgtttcccgtgccgagaaggggtatattagctaaatatggggttataacgagagagatggaattggatatgagttgtaattgtgaatagttaatagctagtgctaaaacaattaaatcgttatatactatgcatctgctatacatgaatcaaatccttctccagaaacgaactacatcggcagccggaaactgggggtctccacctccacgaaaagcgcgtccttgcatgcttttggccctccgcaatttcagcggctctggtttgctcttttctctcggctctgggggtttttttttcttttcacaatttccctttttcccttcttttttttctgctctgacttcatttccccggtcgtgacattccccgttccctcccgacttgtgtttctcccggtccggtgccccgactctttgagtttcccccacactccgccaattccgttcttcttctcccttggccctttccctcttgcgttctcttttcgttcacatcgataggttgtgatatctagtaagttggaaagcgagtcccaccggaaaatgcaatattaactatgatagaaaccgaacgggtctgcgtttaattctccgagattcttcccccgcaaaataacagcgcgtgaccctgatacccgtggtaaatgggagaattgcgattgatacaaatcgcctcgcatatctgcagacttcgggtctgtccaatacaccatgcggtccagcatcgcttgcgctcgatgccggcgcagtaaaatcaagtgtgtcaattccgggatcgatacaacctgccgcgcatgcgaaacgtccgggcgcaagctcgaatgtgtctatccaaccccagcactcggagtgaacaacgccaagcgggatctggctgccctggcagaaggcgacgatcgaagtaacgactgggatggcccgaaacgacatcgttcgcgcaaggtggtgggtatctctggctcctcggctgggtccaagctcggtgtggatgcgcttgattcctcgatcctgacgaccaaagtgtgggaggccgtcttcgacctcttccaatcgcattttgcgactcttctacccttcctacatcccgcgacgtttctcggccagattcgacagctctcatctccccctcctgcgcccttcgatggacaagatccccgcaatcctgcgaataaggtggacccgtcttcctcgttgattccgctgggggtactagccctaactgctcggtttcaccctccgttggctgcagcccactcaccagtgtcgcctagccatccttcgaatccgcttgccgcatcggaatactatgctgcagccctccgcagccggctggccggcttggatggttcttgccttgctcaacctgatcttgcgcgcgtgcaggcgttattgatgttggctttgcacgagtgggggatgtgccgaggcaagagtgcttgggtctacgtgggcatggccatccggcttgcacaggccatgggtctaccctttgaacttgaaaatgaattcccagcgcgagatctttcgcgctcctcccccggcttgcgaaccgaggcagatcacttcggcctgccgcggcgtgtagagcccagagagccgacctcggatgatattattgcacaagagactaagcgccggacattctgggcttgctttatccttgaccggtgtcttagcagtggaaagtaccggcctcggatggtccgtgtcaaggaactcggaattcagctcccgagcgacaacgcatttgccttcggcgagcgggttcggacggccagactcaatgaacccaccgttcggcgcccgcagagtttcggttcccaaagcatgcaaatccccagcatccgtcaaagcataggaggctttggcgatgaaaaactcccatccaatggaacctcagataacaagtcctggtcacctatctctcgccgcaaggagtcgagcgtggaggatgttgatcgatgggaggttggcgcagaggagtcggtactcagccgggtgattcggatcattcgtgtctggggaagcatcgctaaatggtcttgcgctggcggtcgacgcacagagcaatatcccccatggcatcctgaatcccgcttctcttcactccgtctgcagttgaacgagttccaggatagtctttcccgcaacctacaatattcccagcgaaataccgacacacatatcatgtacaagaccacgctggcttcatataccgtgatgcatgttgtctacttcctatcggtaattgtccttcaccgtgcctatattccattcctgcctatccgctgcaatgagccttctggccccttagatgagccgttgttcgctgtcgacaaggtcaatggcccacctgagggtttctggcgggacagcgctcgtgagctcttcaaggcagcgcggcagatgatcgatcttgtggccacctgccaagcccgtggtgctcttgttgagaaccctttggtcggatttgctatctacaatgccgcttttatcggtgtttatggaacacatttcccacatatggatccagaggggctgatgggaactaagccaccccctgcgagccatgatagccaccagcttggtgtcacacaagcacgcaaggccttggatatcatccgagagatgcggcctcgtctgaagatggcgaccggctggtttcgcaccctgaatcgccttcacagctacttttccaaagtcaagcgcgatttccgccgggtttcacgaaatcgtctagatagcatgtcggatgcttctgaccacggtcccaatgggattcggctagttcgcgaaggtggtgctggtggcggctttgaggaatttaagatgcttgaaaagcttttcctcgactttggaagcattgaggaccagttgacagagtctgggatggatgaagactgcatcgcagtgcccgcagcaagcgagtccatctacgagcgcacgaatatgagtgatgctggaagcaatgccgtcaggagcgaaaccggtgatcccggtgaccagatgctcgacggtaccggtcgtcgcgaggtcaacagccccggtctatctctacctgggcaccaaggcgatcgccgtcccagcctaccacttcccaacagccgccaaatgccatccgggtccccttactcccttccatcccttcagcaacatcacccagacggtcccctgtacaccatctcatctcccaactacccctctctgtcagcaaccacgcagtcaccctcccagtacctgacggcaacaagcaaccgcctgaatcccatcaactcctggctcccagcccgcccgcaggttcctcccccgccatactcccaatctctccctcccatcaacgcagccgcctcacacaccatccctgtccttcccccaccgggatccgtcactcaattagccccctcgccgcctctgacctcaacggaatacccagactcaagcctgctatccacgagtgtcggtggagacgacgtcatcgccttcctggatgggtgcgaatggagtcagctatccatgctggcgccttctgagatcggtattcccgccggttggcttagcacgatctggtccccactcagccgctaggtcctcattcagccgctagagttcccacctctccagcaggcacgcatcgaagcagtggcaccaatcgccttgcttcattgtattattactctttacgaattccctcgtccgttacgtcttacgtactgtacgatcatttctgtctctctctcctttatctatgatcgctggcgactcaaaaaatgagacatatcctgcgggaaatcccccgagtgccgaaagcaggcgaattaaactccaaatccaatcatttcctttcctggtctggcctcctcatttactggcccagactcggaatttgaaacgggatcacgaagattgattatcacctatacccagtgcgcgcgaccttgtctttttctatttttgttcatgttcatgttcatgttcttgatattgttcacttgctacctgtcctttctttttctttgggatacgctgttcaacatgcgtgcaaggcgttcctcgtgatttcccgccaaggtggccgtgaaacccgagttgattgttcatttatcggcaatgtttatctccatattggtctttgtccgtttgtttcgagcgaaatttggggtggcacgggagcctggcagcggtggccggcttttttgacttttgttttttttttttttttttctcctgtgtcggttttacgtttttacgatagcctaggcgttgcatttgtcttgcaaactgcaattctcttgggtcaatttatctgcctctgtggctgttttttatccggcattcacttcttcccagcgtagggatagataatatctctcatagaagtacgggtggaaaatagtcatatatacctgcaccatacctataatttttacacgtgagatcttctctgacggttctaataccatccatccaccaatacctcacaccttgaatgctttcaatctatatataataaagcaaaaacaaaaaacatacaacagtgaggattcgctggtggtcacccacccaactactaactcaccggcgnnnnnnnnnnnnnnnnnnnnnnnnnnnnnnnnnnnnnnnnnnnnnnnnnnnnnnnnnnnnnnnnnnnnnnnnnnnnnnnnnnnnnnnnnnnnnnnnnnnnnnnnnnnnnnnnnnnnnnnnnnnnnnnnnnnnnnnnnnnnnnnnnnnnnnnnnnnnnnnnnnnnnnnnnnnnnnnnnnnnnnnnnnnnnnnnnnnnnnnnnnnnnnnnnnnnnnnnnnnnnnnnnnnnnnnnnnnnnnnnnnnnnnnnnnnnnnnnnnnnnnnnnnnnnnnnnnnnnnnnnnnnnnnnnnnnnnnnnnnnnnnnnnnnnnnnnnnnnnnnnnnnnnnnnnnnnnnnnnnnnnnnnnnnnnnnnnnnnnnnnnnnnnnnnnngcgctagaggggaacataaagcagctgagaattatagactacagctgggacaagatagtttatatctcatcgtgaccactaggtcatgtgacctatacgcctagatggtcatagcgctagatatttgttggacatggtggtcacctgaccatcagcccggtgcggcaggcaccaacccccataactagatagttgggcattctgccctttaggaattgacaactgtgatacccctaggtatggaacgcctaagggaatgctatatctaatggaggattgggaaatagagaccgtagtatatatagtagtatgtttagaactaatagctacttcttctaagaagtagtattaaaagtacacgcagtaagagtaatagagctaatatctccgtttcgaagagcctagatagctaataaaagcctaccctcttgctgttctaatttgctagcggattgagagcgaattggtggcatggtgggtggttgaactaactaggtgctaattcatggacgcgttttgggtaatccgcttattgtacatatttttccttggatagtagggtgtaccaaaagcgggctttgactgtactagtaatcgagtaatataaccttggtgtgtaccctttcagtctagcggcattgttgctctgcaattcttactcttgaaattctcatgaaacttccaacaatctggccaactctcttgtttcttcatcagctatgcccgattccaatttattcagcaacactggcctcccggaaagatttgtcttgacgaaacttcaagtccccggagagcttgatgatgcgcaattgacagaatattttcaaccattgcttcacacccctggccacaatcgctctatgtggggaatgattcaagataaacccaaaactgctctactagcgacttgtaagtagcgctcgggaattctaaagataaagatactgacgtgctcatgaattctcagtgtgggagacaactgatgcaataaaatattttcaagactctccctcagcccagcttctctgggaaactttggcagcaaagaacattataatctttagctcccacgaaaccccttatgttgggaattggtttgaggtcttggattcttcattcattcaattattctgggtctacttccaggctcctgtaaccgacgctcagaggactgaaatttcaaagctgagaggccttcgtccgccagcctcgggcttcagcgtaccgagacatcataggcctcaaacagaaattccgaccaaggcatgggcgacccagccagaaagcaatgcgactcagttgatgctgtggccacacttttggcggaactcggaaaaatccgagtggaggcacggattgacagaggtgttatttggcagtacaattataggcaagcggtccagaattgacgatttcgatgctaggctacaagaggtgggctcagtgaaatggacagaagacttttgctctttccggaggatacgtgcttaacataatttttcgggctttatgaaaaacgttatctaaaatcattctagtctaatatttcagtggcaaaaatgtctttcttttctcgtcccgcttgcttgatatattgtacgcctgatcataccgagcttctactaaactctgtcccacgatccttttcactcaattatagctgaaggagttcacctgcaccagaatggaaactctacctctggtttgtcgaagtccactgagtctgctggaagtaccaatatccaacaccgaaccacacatatgtctcaggatttcgtcgaatcaacgtctggtaatttttatcgtagccgctcgggattctatcgggggtcttgaggtatttttgttgttcggtctatgaatctttatatgattagtaaaattgagtggttgcgaagtttctaaacttacaagtactagtaatatctggagtctgttcgtttccaatcgtgagatggaacagcttatgatagaacgtaccgctctgtgggagaatatctgtgatagaaaggcccttcgcgggttccttgtctctaagcgtttcaccggctttgtcatttgtaaatgcagatggacataatgtgatagaactaggggtcgtttcatgttgggtggctcccagatgactattgctcacagtgcagtaggttttgcctctgtaattaatatcgaagaggtactgccttatgtcatccgactaatacggtacctgattattccgtatactccggccatttttttgcaccgtctaaagtatttcctgataagacggaatattcttaattgatactgggctcaagtggtcactggtagtcgagttgtatttaaagatatcatttctattcacatccttagctacgttagaccgctgtagcttttggagccacttgtcgttgcagaataggtatggaatgttggctgttgtagtctgtctatccaagaagttctttataatttgaaggttcgctattgtcttgtcagtacattgcgttcctttaggccatattgggaaatttactttgaacgagattcattgcgtccgtattatcgggggatatgttgaaataagactagagataatcctttgtaactttattctctgacgcagaaggatttttggcatcgcttagtgcctgaaggcctgtattaaccaaagtcctactctcagacagccattttctaagcggatctgggagctgcgagctatagccgccatctgagtctgtgctttctttgatttgaaagagggagtcaagacttggtaaggcgagcacgatgggtataatatagccctaaactagaactagaaagttgatatgtatcgccttgatcaagcgcctttactcaggcgacgtggtatgaggatgtcggagaagcctaagaaatagaataatttgaacttattctcactacttcgcttatgcagtatatcttatatgaaaataatcgaattatccaaaaattacatatgtatgcctatggtattgttactgagacataatgtcggctctctttcggtaaaaaaaccatcgcagggtatggtgaggcccttctaaggttggttggtcacttatatttgttgaggcgctaagctttaggaataaaaagtcttaatagccttggagattggttttctaccgatgcttaagagatgataagaactgcgacgttcttggcgtaaagatgtgagatatgtggagttgaaccgccagaacattttaactagtggatcttggcgattactgcaatctccggctttctaaagataatacttcacaatagtttgaagaagtcgcaccttactgcataggcactatcagccgtgtacggtgtcatttctgtggtcccacatcgtcggtctactcttggcctttttcaatttaaaatttgaaggcatacagccacaatgtaggggaaattatgcctaaagggctccggtgaagtttgattgaattgattgaacgaaaagagcagctaatgtccaatcagtgggttgtagaatacaatatttgagactcatattattcaatagattcgggatgtggttagtctactctttcaaccatagactatgtttagatgtaacttgcagtatgttgggtgaaatataaagagattgatggtgttgaaattaaaggtatcctacctacaatttcagcgttttctctggacctttccgctagaagtattatttcttcactcttgacaacttactgtcacaaatggcatcgacatctttattattcttcctggctgcccttgctagcatcagcggggtctaggcctcatctgaatgcttcaaatccgtctacaacgagacgatcgccttatttaacagtgtaccttttgcttacagccttgatcttgatacggtaagtcattgtcagaactggtgtaacgaaatccctaagtgtcaggtgtgggtttatgtcgaaaattccggccattgtgacctttatcgtactgggccattaagtctttcggataatagcggcttcactttcggtggatgtgaacctgccaatgtaactcgacctgttgttactaccatagaccgagctttgattcctacgcttagtagcactcctgtggaatcaggagacaatttctcggtatggatctaaatcctttatggcgttagtatttcatgttcctagctaaccgtctgttccttgtagacccatgtaaggcgcgaagtgggtcagcactgacataaccgctaccaccgataagggtctaatgcgtgagatggtggaagagcctgagaaagtattttgaaatcatgtttagagttaaaataaatatagcgattggtcaattttatgataggcttagggaagacttctctctgttgtattattagtaaatactaaactgcgtttgtctactcaattgcgttcatggtagacagataagttagacctaggacgcggggcaaagatgctggtaagccgaatataacgcggagcacaaaatgccgagtaattctgaacctatctctatccttcaatcccacgcgaggttaataaagccactgtgctactaaatggcagcctaggtggcagcgctagtgtttagtgtgataaaaatttccagggtcagggtccaagacgctaattttcggatgcggcgggtcctcgggatacgctgtgaaagagatagcagattttccaagtggtctgtgtaggtactagattagctagtgataatttctttagcgttgaaaatattcaaaggatttagtctggtgggaatcagttcgctatatcccgaaaacgagaagtctgtatctggtagtaactgcgctcagtgcgccacaataaagtagatgacctaccctgcgccgattttgcgaaggtgattgggcattctagttcccgaatcgagatacctgacgagataagaaatgtaacgcagatttattctaaacgggaaccaggcgcttcatttaagcaccggagggcacgttatcccggtattattatcgaggtacgctcttcacaagaagtctttataacatcgagacagctttgtgactttcattcgtgcgccgaagaagaacagcaactacagatgcttcagcaaggctctaccaatcgactacgcccgggtgatagaaagcgtcctcgacctcaaacccctccggaacagccaagtttggaagagagaaaaggggaaagtaaatgtggccgtcgaagcagcgatctttgtccgaattcttcgtctggatattcgaaaggtgagctgggttaattattgaatacatggaacaatccgcgaaggatatatcttgtttgtaagtatatgccctataactaactaatgatctcctagttatgagatagtcatttttgcaataattccaagctttcaatgattctttccccacccctacggatctgctactgagctcctcaaacctagaatatatcgactctcgaggccctgctatattccctttctcgatgtggaccagaagacatactaagctcctcaaaagtcaatgtaagttacaatctaccctgagaaccaaaatagtctcgcaagtactcaccattttccctaaagcagaatacaagattataagagcaagacataaacactcccccacatctcggcccgtggtggggacctttgcgccagccaaaccatgtcatctctctagatacgcgggatcaagtttgtttaaggcgcattctcaagagcctcatttccttttgaaaaggagatgaatggatatacagttctctattgaaaagcttgcggcaagtttcaccagaatgagatggatgtgtttattttacaacttcaaactgcaattccgcaattccggtcgcatatgctaacgacggaatgatgacggactttacgactagtccatgcagtccacgcatccgcccaacaaataaagcaatgatctccatcgaaggaaaggatacttaagacgctgtggtgctcattctcgatagtgaggaaacaatcacgatgggaccgccgacctcgaaagtagccctcgtcactggtgccaacggcatcagtgggttttccgtcatagagcatcttgttcgccagtcaaaagaagaatggtttgtatcaattccgatacgcggtctgtatttattcactggatctcacggttccttaggtccaagattgtcgtcacttccagacgccccctgcccaatgcctggatcgacccccgagtagaattcctggctattgattttctagacccagtggaggatatcatagccaagatgaaggacatctgtgctaatgtcactcacgcattcttcacctcctacgtccacagtgacgatttcaaattgcttcgcgaaaagaacgtcccgttgtttcgtaatttcctcgatgcaactatctcatcctgcaataagctccaaaatgtttcgcttcaaaccggaggcaaggtaagcacagcccctttgttgttttatccgactgtggttggctaatcgaaattaaatagtattatggtgtgcatcttgggcctgtgaaggtccccttggaagagtctttcccgcgatacgatgaccagggatacaatttctactataaccaagaggactatctcaaggaacttcaagcgcgtgataggacctggtcctacagcatcatcagaccaaatgccattaacggttatgctccaaatggtgagctcaccccagactgttctaggaaattctaacaccatatcagccaatggaatgtcggaagttcttacaatcattatctatatgctcatttgtcgggagctcggccagccagcaaatttccctggaaatgagtatttctggaactcgatcgatgataactcatacgccccaagtgtagcagatctgactgtgttcgctgcctctcacgaaaattgcaagaatgaggctttcaaccatgtgaatggtgatatcttcgtttggaagtatatatggcaagactttgctgcgtatttcggtatcgaggtttgtattcataccctttatcttgatatgtcaatctcctctaactaaaacgatgtaggtcccagagccgaacttcgtcaaagcccgtcgagctgataccctttcaaacgagatcgacatggtggaatgggccaaggacaagcggggtgtctgggagaccgttgtgagaaaatatggtggcaaagttgaaaccttcgattgcggcacttggggattcttcaactgggctagtggcaaatcctggcttacaatttcatccatcaacaaagccagacagtttggctggcagcgaaatgacaggaccttcgacacttggatcgaaacataccgctccttcgaaaatgcaggagctttgccctcgcgtgcggcgttactcagggactagtcatatcttaccgtcccacggctatactagtctatcatcttcagctattgtttatttcgctatagtgccatatcacgtacatacgaccatagggtgtggaaaacagggcttcccgtccgctcagccgtacttaagcnnnnnnnnnnnnnnnnnnnnnnnnnnnnnnnnnnnnnnnnnnnnnnnnnnnnnnnnnnnnnnnnnnnnnnnnnnnnnnnnnnnnnnnnnnnnnnnnnnnnnnnnnnnnnnnnnnnnnnnnnnnnnnnnnnnnnnnnnnnnnnnnnnnnnnnnnnnnnnnnnnnnnnnnnnnnnnnnnnnnnnnnnnnnnnnnnnnnnnnnnnnnnnnnnnnnnnnnnnnnnnnnnnnnnnnnnnnnnnnnnnnnnnnnnnnnnnnnnnnnnnnnnnnnnnnnnnnnnnnnnnnnnnnnnnnnnnnnnnnnnnnnnnnnnnnnnnnnnnnnnnnnnnnnnnnnnnnnnnnnnnnnnnnnnnnnnnnnnnnnnnnnnnnnnnnnnnnnnnnnnnnnnnnnnnnnnnnnnnnnnnnnnnnnnnnnnnnnnnnnnnnnnnnnnnnnnnnnnnnnnnnnnnnnnnnnnnnnnnnnnnnnnnnnnnnnnnnnnnnnnnnnnnnnnnnnnnnnnnnnnnnnnnnnnnnnnnnnnnnnnnnnnnnnnnnnnnnnnnnnnnnnnnnnnnnnnnnnnnnnnnnnnnnnnnnnnnnnnnnnnnnnnnnnnnnnnnnnnnnnnnnnnnnnnnnnnnnnnnnnnnnnnnnnnnnnnnnnnnnnnnnnnnnnnnnnnnnnnnnnnnnnnnnnnnnnnnnnnnnnnnnnnnnnnnnnnnnnnnnnnnnnnnnnnnnnnnnnnnnnnnnnnnnnnnnnnnnnnnnnnnnnnnnnnnnnnnnnnnnnnnnnnnnnnnnnnnnnnnnnnnnnnnnnnnnnnnnnnnnnnnnnnnnnnnnnnnnnnnnnnnnnnnnnnnnnnnnnnnnnnnnnnnnnnnnnnnnnnnnnnnnnnnnnnnnnnnnnnnnnnnnnnnnnnnnnnnnnncgccggtgagttagtagttgggtgggtgaccaccagcgaatcctcactgttgtatgtttttttttttgttttttttttattcggtgtaaatgaaatatagtaataacatatgtttttatggaacactatatgtaataactttttggaaattaagcttgacgagacataaatttgacgtatctatctaacgctatgaccatctaggcgcagaggtcacctgacccaatggtaacaatgagatataagccgtcttaccattccacccacgactatagtctatagctctcagctattatatattcccctacagtgctgtaccaagcacatacgaccatagggtgtggaaaatagggcttcccgtccgctcagccgtactcaagccacacgccggtgagttagtagttgggtgggtgaccaccagcgaatcctcactgttgtatgttttttgtttttatctattcagtatattattcagtatagatagcaatagatgttcatctcaggccaggttgtgggattctgataatagcattcttggaaattaagcttattatgggtaagcctttgtattgaagtagtatctgaaaatcatcgagtcatgtctgtctatcacgatctataaccaactctataattgcttcgcttcgctgcacaatgatcaggcatttcatatcgcctggatgcaaagacataaatacaagtgggaaagaaaggagtcatatcgtcgtggtcaagtcttcacatcgaggccgtacttcctttcagaccatcgctgcatatcaatgccccatttcgtgatagcaagcacaaggaacccacttattagagcaaagaatacacctggatagatggtcagatatgtcttgatcgtgacctcatctagaaatctcacagattgtaaatgtccatcctactccgatagcaccaattaccggctcaacagccgccgatgctgcagcagcaaagatatactgcaccacgtattttgagctgatcacctccgaacgaacatgcggcataacctctgcaaggtagatagtcagttgagaagtaggacaatagttcaaacagatgacactcaccggccgcataagtattcagtccattgaaagtacccagaagccctacgcccgcaaagaaagcggcgataattggcacaaccataccaccaacttcttcctgtaaagtccagccgtagattaatgttgcacctgggaggaccccgaaaagggtgaccagaccactgttcagtcgatcctgagggaggcgttccccgtttcgtttgagaatccatttcttcacggcgtggtcggacaacctgccgccaatgacgctaccgactagaaagcctattcctggggagaggtagaataggccgctgacgagaggagtcgtcaggttgaaacgtggattgaaaattgagcgggctgatgtgagaattgagtattggaatgtagaaagaaggccacatgtgaggcactattacttgttagtcagccactggacaagatacaatttcagtacttcaactggcagatgatacttactgcaagaaagacattggggtatatgaattgacgaaagatgtgtagaggattgaacatgcttataacagtgcaaaacttcggtttgctagagctccggttcttttcttggatactcggcacgaaaagaagagacaagatgagaccgagtaaagtcattgcgaactgcaaccagtagataatgcgccactgagcaaatgtgacgatgataccgccgatacagggtcctaacaaacagttagccaccctcggatgatagagataattaatgatagtacataccaattgcaggcccactgacagacccaaccatgaagcagccgacagccgttccacgcacagtctaaactcccgtcagtaagtagacgacaatcgggcgggggggggggggaaaggaaaaaaaaaacgtaccggttcaaagatatctgcaagaatagtctgcccagcaaccatgaagaaggtaccggtaaaaccccccaaaatgcgcattgcgataaacatgtgcaaattgatggccgcggcggtaccggctgagcatgcgcaaagcacaaggatagctgcattatatgcattgcgacggccgaatagcttagtgataggaccccaaataaaagacgaaaaacccatagcaactagaacgccggcattggtgacattgagaatctccgatgtagttgaaaactcggtagcaatctccggggttgcgggcaatagtgaagtactagagaatgtgacggctagagtcatccagctgacgacaaacaggatcaggcatttgcgccatgttggtatgccatgggcgtttgagggctggggttttagggccaggtcatcttctgattccgattcttgaggagaatccacctgcggggttggtttttgggactcaagatctggtctggattccatgatgattaggcgttgggtggaattagatagtgtttagtcgatgtaaaaggttgattgaagattcctgcatgactaaagtagtgaaattatgtacacagaaaataatccaacagaatggacattttgtatgcgacccttcggcgtgtagaagctgtcgccgaagtctagtttttctcgcgtagcatttttccccgatgtggatctgacagggcgatcggcgtgggatagccgacagtttcattttgcatttgcacttcatccgtcaagtcaaggtccggtgtatatcttcgtttatatgctcggaagatttctgagtcaagagaaaagaaagagggcgacgagaatggtacgagctcgcgcgctggcctgtaaaataaggcgttttgctggccggatcaccaggtcactatagtgggccatggtaatagctaggaagcatctactcatgtaggtgcaaaactacattgcacggagtatacacttcactcggggagtcactattctcttatcctaaccccaaggacccaccagagagtcgaacagataggcgaaatttagagtcgtgcgatgattggaaatagcaatataggagtaatgagtaatcaaacaggaactgtatataacacaggaaatgatagaagcgatgtcccaaaaagagtgcattgtcgtgatgggaatggtccctaaatactctctgaaaagcaaccacggccttcttcctagtagaactctccctgtaaaatctgtctgggctcggatccgctaggattctgccagtagagagacacagtttcccaggcagtctgcccactcccttcggaaatgaggccagcagattccagatcttcgatgaaggtatatatccagaatctgcacccctcccactcttcagtgaacatgtacctatcgtgtccattcaagatactcaattccgtgatagtttgaactgtggcgtaggcctccacagtgaaggtcaaagtcttgatcgcattatttgtcgacgtgtaagacttggaagatatgtctatcttccctcttaatccatcgtcgccatatccaggtgccatgtcgattctgactgagccagtatcgccaaattgcaggaaggcagcccagtggttggttggaggatttccatcttcgtcgccctcgttgtttggattgatgtagccacttatgtggatgtgtgagacttgtgcctggagatcctttgggtttaaataatccgcatcgaagttgtcattcatttctatatagcgtgtaagtaaatttcaatcttttagaagggatagttgttcacctactaaggtgattgtgaatgatgaactagacaccagtaagtagttgcccgtttttcaggtcggcgagagcgcgaagaatggttattcaaatccataagaaaaccacggacatttatatcttagccagttgcaaaactatgatagagaatgtgatcaataccccaggtgccaatgctgtttttaccgtcagcttcggctttggttagtacttgacgagatgtccaatgaatcagctagcacggtgtatagaaactgcactatttgcaaggatagaagaggtccgggtgtcaattaaaagtagactgttcagatgtcatggtattcttagaacttacattacttctacaactctcatctcattgctcaaagaaaccctgcacctcgacatcttcctctccgtaggcctctcttgatacagatgttacgtattccttgaggcaccagttttctttatctgaatcatttttggccggtcatttaaagtcaaactacgccacgagactcatggagcggcccagcccgggacagtggaaggattgctattcgtttacctgtttctaggggtaactaggtagctgcaaaatcgctgcgtccacttctatgattcgagcgaagcctcacttgtctcgtgttcacattcattacgcttaggtgtcctgtatgcgcatgtattgctggcatgctgaatattccaaattaagacaccaacccattttgtaaagttcatgctctattcagcccagccaatccatagcctgtatgaaatgtctacggccattcctattggttcttttatcggctactcctaggatggagaggcttactgagaaggccacgtaggagtccacggccttcatgtcagatagagcgcagcgtgcagaacacacacctatgcactacacacagaatgaaaagattttacagaatgtggttccactaggatagaaggaagattattaaggtctgtatgatccctatccttgctagcttacctccttggatggtggtgttgttgcgtcgctcgcgtcttgtttgctaggccagactgcccatcctgcatatccttctccactaagtacgtatctattgtgagaatatcccactattgccaaggctagcaccacatgaatatacacacttctaaagtttacctgggctattaaatgcccatgtatatttaggaggctaagatgcagggtatctacttggtcctccattctttaataggtggaatcgtcgcccaacagcgaaccgggtgaacttaaacctcatgcgctctaggatgctagcctcacgcccccaatagccggccgctatccaggagaacaggtgccaccgtaaacgtgcgaaaaagccccaatgctggggcattatgaaattttgcatgcccgcgtattcaaaatagatcggatagaacccagcaagatcccaatctaaaatccaaatctcatccgacggactaagaataatattgcgtggtgcgaggtcatgatgcgtgaagacgaagggctctgttgaaagcatttgtccttcgggagtgggaatttcaggttgatctgctgtttgcattgcttttttcatagaggtgaagttgatccaaaaccggaagaagtactccatgtccctagagctgcatcttgcaggtaggccataccgatcttcgagataaaatgaccgacactcgcccgttgctaatgatccggccacgggtgaggtgactgatcggagatgctgaataaagcgacgaagttggaaacccaactttatggtgagaaaccagctcagttgtgtccacgcttcctccagcgtccttcctggaatacggtccataacacagtacgtatcttccccatccctaactatcctcttcagagcgggaactcggatgcctagttggcaagcgatatcggtcgcccttatcatgtcttctgcctcgtgcggccgatagaactttgagagaaagttcgacgaaagtagggatattcctcgggtggatgcaggcgaaggggagctatggatgcgagaaactaactcggtatctgagtagctccgcagtaagtcatcctggaaattcgattttgtatccatgtccattgttagtatgtgactgctccaacgaaagaagatggcctcagctgatacaaaagtcactagggcaatcacgtgacgcgctctctgttgaccaatcatatccagttgactagctatatttgaattactgggcttcatcagaaagtactggagcacgatcaacaattatatttatcaggcaccagatcacgcgtatctcaatataggggcttatcggtgatggatataacagcccgtttgacatgtttaatatgccaccaagctatgggcagattgcagaagacacggattcggtgacaaagaggaatacgactagctgattgggtttaatctatagatcttgatagattttactcaatatacatacatatggattactatcctgacccaacttagttttgacatacaacaattgcttcccctgtaatcaacaaaataatttcgtagcacacgtaaggacttcacgttcacatcatttagaatcattctactgccatatctaaaaggttttctacaatacttttttattctctttttgacccttatgctggccgataagtttggactcttttaggagctcttttgataattcttctaactccttttttaaatattttcctcctattttctggaaggaataccaagagctgccggtaaaaaatatgagccgccgagtgccgtatactccctcttcggctcaagagataaaaacatagtttgatgcattctgacgtgctcgctgttaccctatacagtttataaatcttcactatggcattcctttccctttctctcacttttctggcaggcagcttgccgttcagcttgctacattggcactttctttgtatatttgcagagatgcttcttctggcttctagggggtagaatctagtggctttgtagcatagagcacaatttaccaccattaccgtttactttcgtaacccactctccatatctactttatcaccagggacctctggtatcattttacttttactcctactatgctcttccaatgccgccccatcaagccctgttataaggcacccttatacctcatttgaaactcacatctattaaaagggtttatcaagcacgtatcagcgttccttagctgcatgaaactcggtaggctttgctccccacgcgaaaccagacctcattcaaccgattgaagctgattaatacaggcttactgaatatggctcaacaatggagttctacagctataggctacagtcgaaagaatattatagatcccgtcccagaaattgtcttcactggaaataaagatggagttcaaggccggtttttccaatcagttagacatgtcgttggagcagtgcttcgggtccatggtatagagagctttatggcagtagctagatcttcatattccatccatcatcatattctcacttttggttgatcatttccttctctcgtagtcagtgcctatattatagttattagagaggacgcgatatcatgtaactacaatctctgttatagaatcctacacttccatccgtcacttcccatgtctacaaaacaatgtcggggagcacacaagaactgcatcattccaatacatcagatatcatcaagatgtcctagtgttccatgtacacttctagttggcctagcgcatatcgcgaagaccgacggaggcctatacgaaggaaaaaaatctcaatcttagaagtcaaaccatttgccttatgctcgacaaccagcttggacactgatgcagatggggatcgaaatgatggtctatatccatcaatgcgattcatcccctttttttgatctcttttttggcctctttctaacattctttctagccccagtgcccctccagcaatgcgagggcgaatccctcgtgagtgagctcgtccgacttgtggatgagaagggccttgccttcggcctgaaagtcgtcggcgttgtgactctcgccctggttctaagggagggagtcctcctactatcttggtggctgagatactgtaccgagcggtatatcactcgttcgttgtctaggatatataggaacaacatgctaacctttggttcttcgatgtagtcggcatagaaaagcggatgcagacgacgttcgcgctgccggtcccgatggcactaaggtacaggcggatttcacccaaaattgagccaggaggggtgctgtagtaggggaataagaggaaggggaggggctagtccctcgtataattatgatatgatcattgatggggaggaggggttggcatccattgtatataaccaatccggccaactgtatatatcaacagcggtctaaagctctcataattatcacaaatacccgcatccgtacatgtatcgctgatatagtcatataaacttaagaataaatatgaccaaggagtgcttgatcttattagcttcttcaaataaggcagccataaagaaaagacctaggtattctcttacagacagagagagaggattaagaggaaaccgagatataatgaatacctacttaaagtatcatatcaaagataatagtgagactacaaattgagattagagagctgcagatgctatggtctgaaagacatggacatgataggagacgtgaacacatcccatgagcatgaaagcaaaagcatgacaaagaacgtacccactgtcccctcgtctctcatctgctctctttccattaccggtcatgaagtagaaacctagttgcttgaggggacgggacatccagggactacagcaaagccgattccagtgtcatcagagacctatatgagtagtataaaagctcgttcatgccgcttaatagaactgttgccgcgcgaagttgcagaagtctaatatcaacagaaagcgttttacatatttaagatcagatttagatagtcaaatagcgttacctataggacgatttttcccatttgcattgtacatataacaattttcctttataaaactctctcacacacaacttgatacatacgaccatagggtgtggaaaacagggcttcctgtccactcagccgtacttaagccacatattctgcacggccaatacttaatgtgccctcagtacctaagcggcactctagggtgagtgcgggtgatataggtaagaagtcttgagactggggtaagaaaggtaagaacggggtgacaattctcacccttaaggtaataggggctaactcactctaaacctatatcagtcctaagaaaaatacaaatagtcaagccccgaggcgcttctcttactctaccatgattttctttgaatctctttaccagctaaaatatattctccgaaaataatatcccaaaagcactccaggaacgtctcgcacgtgcgatatcacgtggcttcacacgtgactattaatataagaaggaaaaagagggtaatactatatactaccctgagctagcgcctactacgctagaaaaatataaccgtacagttaacaattaggcactgtaagcttcactcggattttaccgattttagttcctaattattagtagatagaggatttcctataacgagtctacagacccaaattttcctaacctacctattctgactcctgaacttttgaaacttttcgcagagttttatatcaaattatataaaaaggttctatctcagcagtcagcttataatcacttcaccagctttatattgaagtaggagcgagaaacttctcgatcccttcctaaggaagttaaggacgatattcttaatataagaggtaataattatcctttaggactcgctactaataaaaataaaagtatattagaaccgaactcacagtagaatataagctccctacaaagcccagagagcggttcctagtcaacgggaaggacatagcctacctacttcgatacctatttatagataactgtcacaattatatatatgagagagcacgtatatagaccgtaagttctctctctttatttactggcttaggtataagagcaggggctgttatcgaatcaagtacttattataaattaaatgaatgcttatattatagggtttgtatcttaacgattacaattcctgattatattaaaactgactgataattatcagtaccttttattttatcttaagtagagtaaggaaagggggtctctaatacgttaggtaataattaatcctaaattcttaaaaggctagtgttatcgcgatgatactaccttataagtttacgagctataatcattctatctagaaatagctgatataatagaattagaccaaaaaattggtttagggagtatctagtacttaggataagttttattttctaggtaattgtctataggatagcggatggtgcctttaaagggcttgccactgtaactaaggttcttaccgcaaaactacctaatagaagagagttatagaccttagaatagaatgaaactataaaggatttgctattctttagaagggttactgcttaaagacccgacctaacgaaggcgttaaccttctccttattgtagtacaactttactaccttagcccagcgggataggtttaaagaccagttacgcgtatatagaattcgaggaggcattgtaaataagatcgactataagtatatttgtaccgttatacctcaattttactaaggaatttcagctaaggcttcttaggctacttatagccaggctcttaattactagaattataatacctatctaaaatattagtcttctcttaaggtattagatatataagccttattctatgatttagaccctaactacgaatactacgatatagaataaagcatatcttattactgagacttaaacgtgccgctaaaacttaatatagctataaccatataatttaaatctaataataaaattattaagatcaattagagaattacctacttaacacaggagattactagaagactagaagagaatagggaccttatatttaaacaggattgtctctataataagaaagtaaagagattgcttgcctagaagaaagactttattaaaaactagtaggatactttatatactaagtatatatctaggaacaacttttctaaatataatctaacgcctcttttcgatatctataagaaatatctactagagcgctcctatcttagtaagaatttattaaagaaagtaactctagatagtaaacttagtcgatagtacctagaagatatagtcactatttatatatcgatagaatatactatttactaccctagtatagcccctaaggaaggccgttatctaatatataataagtctatactagagtaagtatacctaaagagtattatagattaaaaagttaataagaagatagtattctactataagggagagctaagtatatactatagtgtcgaagaaaatccttaaatagtatataataccagtagtgctataagaacgaaaagtatgcctatcgacgcgtatagcgcagctttatttaattttattatctttatactaaactcttccttaacgaagattcctaggagaattattgcaaatactatcttaataaccttaacccctaatatagtcttttgactttccgctccatacttattacactaggattctgtccattctgcctaggcgataaaagtaagaaactagacgagagatttcaataataggttataaaatcaactcttttaaatcatattaacgaatacttagggtcagcggactctttagccgcagtcttctgccctcatctgtgttacgaaggaaggaagtatattgataacttatatctccagtggcacttctttgatatatattccatagaagagccccggtcaaattgtgttaaacgaaaaagaaagtggcagcttcagtcagagcctgcaggaactacttttgggaatttgagtgatgaaacattgccgagtttagaggattattttctcaccagcactctgccaaccagttttgaggattcggatatgacctccgcagatgatttatttatggaatttgtacgcttggatgacgactagggcagagcattgaccagggttatatcgttgataatgactattacaagaaacgaaggtgcttggtgttgcactaatcgtcattcctcgctatttattacacgattaaacgatgctagattgacggcatatttgttggtcagagatttagtgttgatacttatttctttcttcacatactttccttaacaattttaatgggtccgtggtcaacaatgagagtgattgtactttaccttaagaattacggcatatagtacccctgactttgcagcacttccggaaattggtgtcaccacgtacacacttcgatagattctcgaaccctagtgccaagataactagtctgttctattgcgtttgacaatcgcatagggagagggcaacaacacgttccagcttgctcgaggatctcaactggggtatttttccgtataaatgcgcgatcaccatgcgatctggatgggcatctagggggatgtccgtataaaaaccacagcgtatagaccatcagcacctgacgacacccttagatgtacatcccctcggcatggctctataagtatgcatttcacaggctcattcaccgtttctaggcaggcccttagtgatatgtgaagtacaggcctaagtgctaaatctcgctctaatcctatctagcattttgcgagtaaagtaattgcccgggcatcacctaattaccagatcgacagtctacaccaatcaagcgcatccacttgcactatatcatcagatcgacggctacaccaatcaagcgcatccacttgcaaaacctggttttataaaacgaggtcactaggctcgactgctataacatttatggagaagcaaaaagtaagggaagtctctttcgtattcacgctagtgatatggaaaacccggtaggcaaaaccatatccaaagagatctatatactattgatcttttctctgcacactatagggtcgggtaacgcggttctatctgagtaggaaaagaaagtgagagtaatcgttcaatccaagagcgggaggatgagctatatcataaatgatattcagagggacaaggccatttgcatagtcacccgataatcatcttatccggagttagtgcagctagatatttcgcttgatgatgctgaagtggatgatggagacgatgccgatatcgaaggtgtagattccgatgaagatgatgattccgatgccgataaagacgattccgatgaagatgccgatgaagacggtgaagacaggtcggaagcaatacacgagctgccaaccttaaatccgttgtccaatgtacaccctgtctcgtctccattttggttatagaatttaaccatcccattttcgtttatatctatccatgcaacaggcatgatgttgtctttcgtgctgccgcatacgcccacatcgagcttggagtagtccttacggataccatgtgtaatcatgcttagatctagggtttcgtcagtactaatagtatatcggtggaaccattacgcaccagaacaatcgtctccatcaaggagaccaaaagatgatgaatgtcccgtgcagccatagttatcatcagaccatatcacgcattggcgatcataatcgataaccgtgagactgccacctaaggcggcgcgtatgtagacgctagcgagaagtaggaagatagagaaggtcatgtttcgaatatttataaggattgaaggatgatagacggattggtatctccagccttaagctattgtgaaaagtgacgaatttgtacggcatatctgcgaatttaaatgtccacacgtctcctgatacactgtgataaaccgtggcaatacgcgcgcaacacttgcgacacactttgcgacacgctttgcgacacgctttgcgacacgctttgcgacacgctttgcgacacgctttgcgacacgctttacgacacgctttacgacacgctttgcgacatgctttgcgacacactttttgaatcgaggtcccactaattcctgacttaatcttagctcctaagccagcttgcgtccctacccctgatacgtagctttgtctagacagatatgtggggtcttgacacggaccatcatctacctgtctgtggcggcatggtgctcaggtggattggggttactgctctaggagtcgcactataaactcaagtattggcgctgtcctataaattgctcgtacagtttgatgattttttagtctacagcctgatttagacatatgaaggcaggtattcttctgcattaatcttagatcacgtatcccaaagtccgttaggcttgaacgtaagttttgataatatctagcaaatactatacatgctaacatcgcctagaatgaagggaactgtcacctggttttgcgtgtcttgtcatgatattgattcccatcgcatgaagatcaaattcacaggaaacgagcctggatcctattttgtttgcgtttggtcgtatttactccctgctaagcggcgcatcaacatcaatacactatgcacaaattgcttagaggaaaccaaccttctgtcatcgaaggatcagcgagagttcatctacaagaagaaggatcaaatcatatttgaaagacgtgttgtttgggcaaagcaggagtgggacctttgggttacttctcgcgaatgccaacgcatcaacgaatctgtgcaacataatgggggcttgtgtgttcatctatttggtggtgttggtatatattagtctcatttcgagttctcaaggcggggcggatcagaaaatccgactaagggcaagattgtcagatattaggttataggaggaattggcataagaacactgtcatgagtctaagttctgtacagtacgtcccgaaaccggtgcaaccacctcactctccgcctaagggcaagattgtaagatattaggttataggaggagttggcataagaacactgttataagtctaagttctgtacagtgtgtgtttttcatttaccctgacccctcgcaaattgaaagcgatatgcaggatgttctgtacagtggaattcgaaatcagatttaactttgcactcttacgatatcattcccggacccgtagggacacactaatctaattttagctctacccctggtagagctgtatcgtactggagacgcgcgctgcgcacgctgtggccctgaaacgatttatagggaaaggccggaacaagaagtgaagtcatatttgtgttgctcgactggtacttggaattaagtgacattgacgaatcaggacgtagaaaaatttgactaatagccgcaaaatcttgaataaccatgaatcaggtgtcgtatttcgattgtgcaagtatatcggcatatgatgtcttacgtggtcgttgggaacgcctctccggaactggggtggtagtccgcgacgaggctttgatttcttcgggcgtgtctggccatgtaatttgcgcgtcttcctcatcgtcgtcaccaggcgcaattatttgagtgggatcctgggactggtacgtgataggaagggactcggtctgtggccttgcagccgatttggtgggcgtttgtgggccggctctttgagaccaacggtccacgcgcttccgtttaccagtagcgggaggagtagcgggcaactggtgattttgtgttgggagaaaatgtatatcatccgtaacgatagctaactggcgatgctcttttgtgaggccgaaaacacgaccggtcaagaaaacatgggtgttcatactcaagggtggaaagttggcccaacgctgaccatttttaaagtaagcggtgatgggaaaggtgtgattggttcgggttgaactattgtaaacagtagtctgcagacggtagtgaagaagagtgggcccgccgttagttggccaccgcgctcaataacgacaccgagaaatgtcactattggctgggcagcctcgggacagtacatgaaatacgattcgatatcttcttcattccccggatgactagattgcgtaagcttggtactgtagcagatgggacaaactgaccggtccagattgtgggcgtggaggagatatgaaattcctcgtcatcagatgaagtagtcaggaatgaaccggaggaatagacgaaagtgtttggtttgtaaaggtcggactggttgccctcattgaaaaatctgaccaaggtgagaattttatcctgcttaacatcgtctgactggatatctttccatggtagattgagcgaaacacggagttgcatggaaagccctttgccgggacgtgtaggatccggttcgacatgctcgacaaagtcccgaatatggataatagcgggaaaagttgaattggaaggcataatgttctcaggcgtatatcagacctaaagaggtggaggtgaagtatgtctgatcagtggggtttctagcgaaggctcgggagtgactgtgtgatgagaggagaagtgagtaagagagagacgtgattttgtgtttagggttattatggcgcataatccctgttgtaaacacgggcacgtatatgatatatcctagatatatctcaccactggtttgataagaatcttagtggatgaatttaggatttaggtttttgcaagccatcatttatgtatgtaagacgtgagaatgcaactcgttatgactcaacaaggttgataagagaattggtctatactattaacacgcagcgagtttcgaaaacagcttagacctcaaggcaactcactatttgtttatcggcgtgtactcggaactgtactatgatcaactacgacgtaattaataaatatatagtaatagataattcctttaattccagaccgaccgcatctttattatccggatccaacttcaacctgcatcctcgtatggacagaccgaagctgggattaattagtgatatgatacatggcgaatgtagggaacagaccatcaaagatatctggttacagcatgcgtactatcgaaatatccatattcaatagaagtgcgaatactagcgtgaacattgttttgtaattgacattgacttctcggttttcatactaagtaaagcaaccgacggccatcccccgcacaacggctgttcgccaagcacccttgacaaactgttgagcagtggttcacagctacattaggcgatcttctcagttgtgttcaagtagaagactggagttcgatgatgagcctctcgatgcgttgacgaatttcgtgacggatagtccgtacagcatctaacccttgcccggcggggtcattgagttgccaatcgaggtagcgtttgccagcgaagaaggggcagacatcgccacagcccatggtaatgaccacatcgctgtcttggactgcatcggcagtgagaatcttgggtttttggttgctgaggtcgatgccctcttcgcgcatagcttcgacaacgactggattgatggagtcggctggggccgatccggcagagcggacttcaatggtgtcaccagccagatgcatgagatagccggcggccatttgggagcgaccagcgttgtgaacgcagacgaacaatacactaggcttagccatgatgtgcctttgggatcgattgggcggtcgttgtggaacagctcgttggaagagcgactcggttgttaaagtagtccgcaattgactggtacaggtggcaaacgtctcttcaggtaattatgaaacgagaaaagcttcataagcggtgtctcaattcccgtataagtaatgtgcgagagactgaatggaggcagcgcgtggggtttatataacaagtaacagcttgtgagagagggaactcaacaatccgttgatctagaacattctctatctagcagaaaaaggcagacttgtgtaatatctcattcactagcggctgttgccccacagtttatcaaagcgttgattgagaatctgtgatatagtcacagtatgtgcaatgtcacatcctgccggcattgccggattagaaatcaatacctggccatagcctcagatcctgagcactaagtgcaatttagactggcagcaagcaggccttattctattacgtgacgagaggacactgctatcgaatcctattccaacacgggcgaagttctgtaccagccatagacatgtcactcgaacaatatgactggtcaaagtttgtaagaaacacagagactgcattctatccaaaatgcgtgcggaacatcgaacaagttcgagcctcgaaatcttacatgccaatgacaaagcaagagtcgccaagaacttttgctgtatgtcactcccttgtgctgattggctaagcgtaataaagtgtcactcgtctagtttgattggccaccaaaatgccctttccgagttaatttggattagtgtcgcccttcaaggcaagaaatcaaaatctatatatattgcagacgactctagctaacaagggtttgtgcaaatcactagcgtacgttttgattttccttcgaaatatccattgaggacaatactttcgcagattccaagccatcatatcttattcggagctggatatggcagccccaacaggtctgcacccgacgaaggaatcggaatatcataactcaatactgcatagccagccgccaactcctactgctgaggatgtcgaaaagcaagaatcggaagagtctacagccaagcaatcagccttcaaaggtcttggctggttagatcgttttctcgccttgtggatcttccttgccatggccgtcggaattatcctaggcaactttgttgaaaacacgggtcctgctctccaaaaagggaaattcgtgggggtttccatcccaatcggtatgtgcgcgtgaactgtgaatttacaaggccttggctaaccggtgcaagcaattggtctcttggtcatgatgtatcctattctttgcaaagtacgatacgaatctttgcaccatgtattccgagagcgtggggtctggattcaaattgggttcagcatcttcatcaattggattattgcccctttactgatggtgagactaatcccactcctcatggtgatgtgtactgatatgatccagcttgcactagcatgggctttcctaccggacgagccagaacttcgggaggggttgattctcgttggattagccagatgcatcgctatggtaagttacccctttctttgtttatgttgtaccggattcagagactaattgatcatgataataggttcttatctggaccggtctcgctggcggtgataatgaatattgcgctattcttgttgcagtaaattcactgctccagatggtgctcttcgctcccttggcaatcctcttcattaaggtcattggccactcgggcagtcaagttacactctcatattctaccgctgccaaaagcgtggcggtgttccttggcattccattaggtgccgcaatcattacccgcattgtacttcgaaagataactagcccacgttggtacgaccaggttttcctgaagtgggctggcccgtggtcccttattgggcttctttttacgatccttgtgttgttcgcatctcagggccgccaggtggttcatcagattgtatcggtcgttcgagttgccgctccgctcatcgtttattttatcgtcgtcttcttcatcactcttcttgtgacttacaagctcgggttcggttacaagttgtctgctactcaaagtttcactgctgccagcaataatttcgagcttgctattgctgtcgctgtcgcaacatttggtgccaacagcaatcaggcgcttgccgccactgtcgggccattgattgaggttccagtactgcttggccttgtctatgttgccaaattcatagctaagcgagctggctggaaagactgaatcgaaaaataagaggaaatttgcgacttaggctaggctatgttgaagcgaggggaccgatctcgaggcgtacagataggcaatgaacttaacagtaatagaaataatcataatttagtggtcaaaatttgtctagatcaggctgaacatacgccatacgacttcccgggtgataagcccgatctgtagtttgaagtgtcaatggatctctaggtgacttctgagttaagataattatgagactccgttgtttaacgcgtggatagcgtacatactgaggccgaccgtactatagccgataataggagtatccctttagaagatgtaccctttcgtaagtaaaaagggaggtatttgattgggaagagagggggaggggggcggaattctaaggcaaacccccatccaataaagttcattgagtgaccaccggaacacactattcccccgcagaaatttggtggcggtctacatcctagctcaaagcattgcttattaaacaaaatatggagaagctcccgaatcagcacagcccagccgagccgagtcttttatgtcacaactacaaggtaactggttacctcaatatgtctaagtcggtcccccgaagacatttccaaatcgtctgtagtccagtccctagagctcgagaaattaagtttgcctaaagcttttgtgtctgttagattcatctgtccctttcctcccccctttttttcaccaggccacaaaagactcttgatatccatcatccatcgatcgtctggcctgattaattaggtattatgtgctttaggtggatacaacaccaatttcaaagttgaaaccccggtacatctgagctattcagctattaacaagagcacgaagatcttttccagcatgagcccctggttatcgttgttggcattaacacaacccgctgctgtagatgattgttcttcagccactaataccattactaaaacgacatcttctgttccgaacccgttattgccatgctcatgctatatttctattcttatgtcggacaacattcagcgcagaagtcaagacgacgtccactcaccaaatggacctctagtgcatcggttgtactcaaaactgaacctttcgcagccggggcgacggtggcatcccagatctgatgtcaagttgctgcctgcgaagtacgaattgactgaaccgtctgatttggtggtgcttatctcgagcatgctcaagaaattgattcagataaacgacaaaatgtcactgggccagggtcaacaaactaggtttcactctcgtactgcgccccaagtttccgtgtacaattaccttcagcggttggctacgcacgccaaactcccgtctgcgatacttctcagcatggtctattacatggatcggctctgcatgttatatcctgctttcacggtttccagtctgacgattcatcgattcctagttgtcagtgcaacagtcgccagcaaaggcctgagcgacagcttttggaccaacaagacatacgctcgaataggcggaatcagcacgatggaactgggcatgctagagcttgaatttttgttcaggatggaatggaaaattgttccaaagccagaggtgctggttgactactaccggtatctcgtcgatcggtgtgagagcttcaagatcgatgatccgagttccgactctagcaccgcgtcagtgttgagataatccacccacgtgatatcggcaggggaggggataagttctgttcctaagagatttattcttaaataagggccattaaagagtcggccgcggctgggtcacaataccagcatggatggaggattacaccgcgtctggttggctacagcaatttttttgctttggttaaggttactcgtcgtaggagataatgagatagaaggctaaagtacgacatttgaaaagcatagtttcacagtaagggactatacagttctttactctatcgtccactattcacaaactgtcttaaatcataactgcctgagaatccctcttcgaatttttcaatcttttcccgcctggttcgctgaaatgatcagcaagaaaattagatgtgggcccgcaccaatattgtatatttaacaaagtcctcgaaacagtcaacggttgccaataggcatgagccgctcatccggattgaccttcatccggaatgggtgtacgactccgtaattgagaatgatttgtgatggtaacatacgcatccagccaccgaggatactaaagcagttaacagccttaaacaattgtgatccaccacacatctggggcaatggcgagcattcggccttgagttggacaagcgcttgcagtgcttaaaggaatccaattaatgcatcgctatggtaaggtacccctttctatgctgtcggactaattattcatgatgatagatcgtattgtctagctttactgcatctgccagagattcatgtctatcacctatccaatatgtcgaaaatggacatatttttcaccatgcaatttggttctgaatcacatccaagttcggatcggacatcacgaaggtctgaatgatttcgtatactttcgataaggcttgctgcagccacgcacgatgtaaattgacctgtatcctgaacaccgccaaagtgctctgattcagggacagtttcgcctatgacagaaacgagctcgactgctcgccctgcacttgattcttggatattggaggcatctatgctggtcattgcatctgatctagacggtgaagacctcatctcaagagtcttaagcggatgcgatgagttgttcaccttcaaaggagttgccaatgaatgatggtgatccacggaagtttggccgtgggccgtcggcaagtgcaattttgctgatggtagggagaccactggtggaaactgagaacggatagagcttgctgtttgtctttgagattccaagtattcttcgatttgtgtttcggtgacaccatggatcagcagcagggatcggagagaaacgttttctgctgcgacttttcttcctgctttttgaacctcctgtgtcgccgctacgccaagcctttcatatgaccttaattgttgctcaagttgttgggtgtattccttgcgccgtgtgcgagaacgccgttgattttcgcggattcgagcggatgatacatcacacttctccatattgacagctttctttcccttcatccctgtgctcgtaaatgggaatgcaagtggtgaaggtacagatttgggggtataggggaactcttagaagtctgaagatatggtcaagctgaaacggaactcagtggcgacttttagtcattcttctaactagcctaaccctgaaaataactatccagcccgggtggggcaaaaaacatattatccgggaatctatttttaatattattgtccaatcacatttagttaatgacatacttcctccctttggggaagttttactatacaactgcacgtataggcaactttctgactgtcttgcctttttgttacctttgccacctaccttcgcgagtgtaacctatgctatcttactttatacaaagagcgccatcgacttttaggccggcaattccatcatccctgctgcaccctacatattcagcaaggatatcttccgctgttcctcaacaagtgattgcgaacacccgccaaatcgatgtctcatatcgaactctagagttacgtccaagtgaagatagccgagatatccgccagaagtatcggccattcatccttagcgacgatgcaactgaagactgggtcaataacttagacttgactactgcaatggacatggctgaacttgacctgcagcttacaaacaagaggctgagggttctggtactttatggcagtcttcggagaaggtcatattcgcggctagtggcactggaagcttgccgtatccttttccggctcggctgtgatgtgcgtatctttgatcctgaaggtcttccggtaaagaacgacaacgataccgatcatcctaaagtacaggagctccgagagcttagtgtgtggagtgatagacatgtctgggtctcgcctgagcaacacggaaacttagtgagtgacctttcgcgagtgttctaatactcagtgcagtaattactgactcgttctatccccagaccgctgtattcaagaaccagatcgactggattcctttgacgactggaagtgtccgtcctacccaaggccgaacgctggccattgcccaagtgtgcggtggatcccaatcgtttaatgccgttaactctttgcgtatcctgggtcggtggatgcgcatgtttaccattccaaatcagtcctcgatccccagggcatatacgcaatttccggatgaaggtcaaccagaagatcaacgactcatgcctagtggcaaccgagatcgtctcgtggattgcatggaggaattcgtcaaatacacgattctgatgcggcctcatatcggtcttttcggtgatcgctttagcgaacgggaggagaagaaagcaaaggaggaaaagatgaatgctgctgcagccagataagagatatagagcattatagacaatgcctgggagacaatatcttataaaacgattcttcagcatagtgaagtagagttggcccgtcgtttaggtgaccaccccgctcaagaacgacgccgaggaaagtaactattggctgggcagctctgggacagtgcataaagtatgaggctgtatcttcctgattaccagggtgactagactatataagcatgtaactggaatagagaaggcaatgccgatccaaattgtgagcgtgaagaacaatatgaaacctttcatcctcagacgaggttgtaatacaaaagcatttggttgataaagatcaggccggttgccctcattaaagaacctaaataaggctggtaatttcattctgttcaacatcgtctgaatgaacatcctggcttggtatattgggtgaaacacgtagttgtatggaaagccctttaccggggcgtgttggatccggttaacattattgaggacgtgaagaatggcgggaaaggatttatttgatggcatatcgaaagtagatatatacagaatagtgtgggctccaattatctagggggataaaaagaaacgaataaagtagacatagttgtggtgaagcatatcaggcgcagatacgagcgaaaatgtgatgagtctaaacttcctgaccgcttcttcgagaggttattacgacatataggacaggagtctactcatacaaatgcatgtaagacgtggaaaaagatgattggatatttggccacttagttttaagaatttgtctgccacgtaccaagagtagggacgcattggagagtagggacgcactggagagtagggacacaccagagagtagggacgcactggagagtagggacgctctagaaagtagggacgcactggagagtagggacgcactagaaagtagggacacaccagagagtagggacgcactggagagtagggacgcactagagagtagggacgcactggagagtagggacacaccagagagtagggacgcaccagagagtagggacgcactagagagtagggacacaccagagagtagggacgcactggagagtaaggacgcactagagagtagggacacactggagagtggggacacactggagagtagggacgcactggagagtagggacacaccagagagtagggacgcaccagagagtagggacgcactagagagtagggacacaccagagagtagggacgcactggagagtaaggacgcactagagagtagggacacactggagagtggggacacactggagagtagggacgcactggagagtagggacacaccagagagtagggacgcaccagagagtagggacgcactagagagtagggacacaccagagagtagggacgcactggagagtaaggacgcactagagagtagggacacactggagagtggggacacactggagagtagggacgcactggagagtagggacacaccagagagtagggacgcaccagagagtagggacgcactagagagtagggacacaccagagagtagggacgcactggagagtaaggacgcactagagagtagggacacactggagagtggggacacactggagagtagggacgcactggagagtagggacacaccagagagtagggacgcaccagagagtagggacgcactagagagtagggacacaccagagagtagggacgcactggagagtaaggacgcactagagagtagggacacactggagagtggggacacactggagagtagggacgcactggagagtagggacacaccagagagtagggacgcaccagagagtagggacgcactagagagtagggacacaccagagagtagggacgcactggagagtaaggacgcactagagagtagggacacactggagagtggggacacactggagagtagggacgcactggagagtagggacacaccagagagtagggacgcaccagagagtagggacgcactagagagtagggacacaccagagagtagggacgcactggagagtaaggacgcactagagagtagggacacactggagagtggggacacactggagagtagggacgcactggagagtagggacacaccagagagtagggacgcaccagagagtagggtatcagggatgcgcaatcataaagttacagtatcttagatataaagagtataacctcacgggaacccgagagatcgccgagaaaaatgtggagaaactttttaggatatttgaaatcgaaggctgtggtaacctagagcctaagcacagagttaccgcgactattaatcaggaggtcctaagaaaagcacttacaaaatcaaatctcaccctagaagcacttatcgatctaaaaaatcagccaaatctcctattagaaggagaggatatcattacttgtatatataggaaatattgtctaaaagctggcgagagatttggagaaactatgtgactggttgatctttatctaaatagtagggcagtattaaaaaatatcgaatagagactaataacgttatagatatctcgatcgatatactcgcctaattgcgcgaagaatcgatataaagtataagctttactattagcgaaatatatcgtacccttaggttataccaaatttcacaaaaccctacttaagagtagaaatagtgggctagacttggttccaaagactattgtaaacaaatacgatgcttataatataacgattaacggcgttgtattttagacaagttattactatacgttaggctatagaagccactacgatcttcctaaattaccaggatattaggtctaaaatgcctagaggtatatttaataattgtatgcctcgtatatagctaacttcctagatactgaactattatctatatatagtcctaaaaatatagataaaatttcttaaatcttaggataggtggcttatcgactcagattctatgtcctatattaaaggattaatacctagtatcgctatagtagaccgaaaatgtattactaatcttatagatttaaaaaagatatttcctcttcttagaataacttaatatagggaagtccttaagagtcactttctctaaatacctaggagaatattatctcttactacacttatctaagatatactgtttattaagagactagtaagagcgctctattatctctatcctctaaaatttaaataaagcctttgaaaagttatacttatttaatagaatcttatcggaactagaggtctccttaaagtctagataacagaacacgagtttataacgttataataaactgaatacccgttcgttatatctatactatagctttagctttttacttataggtattttgtctactaaggaggctgtataagaaattttcgataacaatttgaatattttactatagatatgagcctgagtaagcttgctatattggcttcgcgattaggctttaagttggactaaattaggtagctttaaagtagaaatttagggtaatatatggtataaggcttttttgaatcacttagtagggaggagttctataaatataaagagcgaaaggtataattgatattaaatagactttagaatatattacagaaccttcctaggtatctggcggaggataatagtatagcctgatttataacaaatgacctagaacttaaagtaagctaccgatttaatagcctagcataagacgagtatctatagtagtgcagaaacattttttataatcaaatctttggtcctaattagccaccgttagaatatataacgtcgctcggtatggtaaaagatattattagattattctttagtaaaagtttattttttcagctaattttggatgaatgataagctacccctatctaaagtcctataaggcttactgagactgtgctaggatctatcgatactaatatggattttaaagagtggcatctataagttcaacctataaatctatcgccttcggaagtaccctaacccttaataaactctggactagagttggtagaggaagatactagtaagctaatagagttggctaatcacctaagtggaactcctgattgtgatactctaccgttagcagctggtttcgaggaaacgtcttaactaatagaaacgaaaaactacctatccgttcgaaataaggtacctgagatccttttaacgtggtatcgattatattaagaagtgatcgttttatacctattcgaatcacaagtctattacaaattcttcttgggtggtggatttaacctacgagcagtcttacaagatctggtaagtgatcatctctttatagtgattaatgagtatagaataggcactctggatatgaataaggtatataaagcagctttgaaagaacggttgatacttatcgggaaaatagataatccaagttatggaaatgacatggaagggacgattttattggataaactccgtgattacgttctagactatgatgttcatataggaaagagaaaggcagattctacagacaatcgatcgagaaagcgtcatcaggacacggtacctgataaggagttataaggaataaaactgttttcttgttcttcaatcaatttttcatctcatggaggatattactccctccgccacttatctgcactgttacacccccttttagtctaataatgagcttcactcttatctgaaggattacgcctctaagcagacagcggcagtagttgacgacaccatagtggcgtactacgtagcacacctagtgggtactgcgacggatgctttacccccagatttgcctataataaattccgaagtacagaatatagacccctttatgctgtggatgatcctcctggtgaacaatgtaggacacaaaaatagcaccacaaatatttttttggctttctatcacttcaattgtagtcccgacggacgaagttctatttcgtttgcacatttggtagccccgacaggtagagatttgcgaacgtagtaattaatattcttctcagctcctcatattcctaatagctaatttgttggggtgtattatatccaacacatcccatcaaggtgaacgtcattgacacgtttgccaatgcggattcctaaaggaaatgcctggtggtaatgacgctttaaactccaacatccccctgggtttgccagatgaagaaactcttcctttcgatctattattatgcattcacgtcttcagtttaaatgatactgacctttagtagatcctctgcggaactagaagtattcgccttctcgacaaacgactgcgccaacttagaaagagacggcatacccaggccttgcttagggtcgcctacatgagttggtcggtcacttaatgaagtcacgatagacccaatagcctcgatgtcttctttgatgccgtcgcgcgatcttctcttcattaaacactcccctatatttgctgtctaatggtcagagttggtcatcatattcatcaagtcccatacctatcttgacttcgcctttcgatatgagaagtatattgctacaatccaacaagggacaagaggtcttcaactcgtagtggataaaaataacccctctaaggatctccttgcagatagttgctatatctgcttcactgaagcgaacattcgttgctacacaaccaaggctaatagccaaatgatgatattcgtatacgatgtagaacttccctccagattgaaagccttctatcaaacacaccaagttttggtgcatgacagattgaagtcgtctaaaagcgtgggtgttttgaatgctacactgcttaagaaagcaggtaggtaggttctcagtgtctttgagccctatcacgcctgggcctgcctggtcaatgttgtaagatagatggtactgtgccggtgattccactttaacagttgatgagctgttgatattttcagttggaatgatagggaccccaagtcgatacgcataattattttggaccaatttctcattgggtttctcgatttcggtactttccttgacgatacttccattgtcgggccacagtttctcaggaaattgagtttcgcgcttctcccgattcaaattggatgccattctgaactggttgtgaaagtggaaatataatattaacactttacatccgaagtgctgtccttgtttatatatttaaggattatatttcgatgactaatactcgccttgggcaccctgcattcgcggatatattttcagtgtcgcagggtggagatttagtaaatactttaaagttacgatcggctaaattgcccgcatatctccagcatttattgatgtgttaggcaccggacgtgcagctaaatatggttgaaggtagctggtcggtaaattttctcgatgtaagtgattttatacaaatctagtattttagctgagagactaaattgaagaacactcttttctattccaccgtatttaagtacttagattttggccaacaaagtaactatatattcatgggaattccttctctgcgctttcgcaatgcctaatattgtacattaccctgttctctagcgtctttacattcgtttcgttttctcacagcctaaggaaggcgcgtaagcttccagtttgaccccaaggctggaactcaggttcgaatagctcaacattcttatctacgcgtgacctaaccaagttcctgatatcataccgagtttgtgtttatatatatactggtttgagataagagggcgtttcataatgaagggagagaataaggcttacctaggataatcattttccctatttgatttcctatctctatatcaagctgctcttcctagctaacgcgtccactgtgtatatcgataagcctattcttaccaatatgctgaattttattttctaagtgagtatatagtagatcgtaaattgagatataaagtatctgcttagtgtaagtagatagtattgctaatatagaaatgggtacaaatgtatccattatcttacctaataagggtctagagtaggtctcgtatactcttataattactaaccctatctaactgctagataagcgagattacctatatatatacttaagcctttttatagctatcgagaagctccttaatatatagtaattgagccgcaatgccgataccggtagtaattataaaagtatatctatagttaccgatattataatttaatctctaactaacagataatagactaaaagggctattaatctaggccctatattctctgtttagcttaatataatcgaagagtctctttataaaactagaacgaggacgaagtaagattaagattaaaaccacctagctattaatattattttcctactagctgatagtaaaagggtgtgattaaaaaatataaaagattcctatagaaggaactcctaggttaatatattgactagcgcgtacgacctacagtctaggtaataatagtattattcgagtaatattacctatatagggttgtagatttatttatatatagctttttcctatcactatattgcgatagataatatgaattagctgtaaaacccctataataacgaaggtatatataaatactagtaggaatacctaaaaattccctttagccgaccggatatactactatactctatagattatcgttactatatatctaatataggtaataaggaatacttcgtaaacccttttctttactaatagtaatactactaaagctaaaaatatactagcggccttactaattttagtatctatttaaactttaggagctctaggaaaacttactaggagaccgtagaattatatcttatttacctaagatattgcccttaattaagtaacgattataatataagttagagctttaactagagctactagcgcaaataatcgataaaggaatctataggaatagaaggaaattctaagaagataagcgctaaacttataactactacctaaaaacattggaaataagttaataagtaagagcttcgctgccctcttactagtatcttaaacggaatggacccgtataatattgtagacactagtgctggtaaaataaagaactattaatattaaatgggttcttgatgtacgtctaagaccggcgaagtgctagtaggattgggtataaattatatggtgtaatagaaacggtcgaatataagaagataagaaaggagaggttgataagaatgagaatgtatataatgtaagacggtataatataaatgagagagttataagaccgaggactacgctgtagattgcctctggtattgttagaaaacgagtgatggtaaaataagttatttcagtgaaaagtccagaaatttatttatctactttggcatgtactagggttggatttataggtctttatcttcctatttgcttctttcctggcggtacttaagaatcataatacagcgggccttagccagttatgattggtagaaaatcaagtgtataatcaaatccctgtacccctaagttgtaatggtgctagcttgggctagttcctgtcttagctttttgtggggcgagaagtggagaaagtccgcgacgctacttttgtgtccgcgattctactttcgtgcccgcgactctactttcgtgtctgcgactctactcttgtgtctgcggctctacttttgtgtctgcggctgtacttttgtttccgcgaccctacttgcgtctgtgtaattctgccgttttcgagcgcctagagctttagcctacttcttaaggatgaacgtgaaattaaccttaccatagtactcactagcccattcctactgtggcttcggaaatcatcgataactctggacaaaatgtaattcgcttataccctaggcaaatggcctatgtctgctggagagctattataataaagataaagtaggccagcatgccctctttgccatcggtgggagaaaaaaaaagccttagctaatcttactatggtgaagatgtcttaacctaatgggttaaatagttccttcctaatagctaccgctgagaatgatcctagctgcgaattggaaagtctcagctataataggtatattcctaagatataagtttttctatcatactttctactaagatcttgatgttaaaatcctatctaggtatggtttaccctaccttgggcatccttcctaaaagtattctttgaattggaagattaatcaggctggttatagatggctaagccttagtaactactttgggtactcaaccgtcttgattaaaagaagagatgccggtagatagggcgctagcttctctaaactgtaagttatattatatgaaaatgtagtgggcctagtggaggctttctatgatggtatatctacttactttatttataattactatggtttcgctgttaatcttatataagtcggcttaactcctactttagaattaagtgagaaagatctggcgagtatctatagaagtgttcttaggggccttaaatatatctatgagtagctctatatagtctacgggggcgtcaactatgataatattatcctatgctccgatagagctattaagataggtaagttatatataatattatcctttatagatagaatactaagcctactagtaaatattggggatagtatgattaatgatggtcctatgtctatggatcttgatcgtgaaaatattggcttactattactttaattaggtgatttatatagatatatgaaaaatcctgaaaaaatccctggaaaagctgcctataggctgttgaagtatacagctcactttatagagtatattggcttatcattatatttatatatatttgaggttcggctactatttaatatcatttagtctcacactaataacatatagcatacattcttttagcaagtggaatcagacagtcggacttagtatcttatacctcattatctggatacaatcatatactgggggtttatgacacaagaaacggagacctgagcgagactatggttctctttctaattcatcacttgcagccaaggcagaaaattgtaggactctcgttgttaccaagctttttgctattagttgaatacagtttgtactagagaatttgatgccatgccttatcctttacacattcctagccgttacccctgggataacataatatagaggaagattaactcttagacatagaggggttgtttgttgcgaaacatcagattatattcttatttcaatctctctagtttaccaaatttataaataaatagtaaaatgagggagtaggcaacggataggctaaaggtaatcacagtcaaaagcactatgatagaccaatcgccattataagtagtatataggctgataattgtagcgagaaagccagctaaggtattaagaagcgtaggactagtataattagggaagttcttatataatgaatagataatacttatataaagattcgattggtaagctaaatataattcccccgatattcctagaatagccagcttataatagccaagcctgatataaacagtatatatactgttgcgagaaggggaggattctgaatagtatttaaaatccactcccctactttattatcagtgaggctattatagatggtatcggacttttggagagatgtgaacgttctaggtattataagatatctagtaagaagtatccagtgtactgtactagtaagaacgttgtcttgctaggaaattccgtccgcttctatgattatccgcatgtaactggattcgaagggctcgtaagtcgaaccaatgacttgagtatccggatgactaggggactgagtcgccatgttcgtatttgtaagctagataggctgtaaaatggagggtagcctttggtccttaagaaaacctgcgacatctaaaacagctcgcaagagattatgtcaactggagcttgacttattttcacaaaagcaaagtataatctgacgcaaagggtacgcaccatctattctcccctctacattgtactaactttcgttccgcttgattgaattagtaaataaacggtgaaggtaggatcttccgagtaactacaaaatcttagcagatattttgtcgcattataaaaggaagtatattctattaatcacattcaccagacttgatctgtagagcctctttatcagcaataacatttgctgggtctatatccctatagagatcttctaataatcgaaaatgctccaatctggtggcgaaatatcgagtaagccgagataaattactctcggggctttccggcaggccttctattttgctgaaatttgttcgttctagattgggatactgctgttcctactagtctcttagcttaatggcgccgaaaccctaagcctctttaggcattgtgttacttactagctgtttatcattagggggccacgatctatcctcgactgagttatagataaacgacccttactgatgattgaagaccaggtagatatctgtattatagaacttggtaagcttataagctttagcttttaatgtctgggactgccttatgaatttaactcgggagttcctgtaaggatcggggccacctatgactttaatatcatttagtaaaagaatctagaataaggaaaggggtaacgaaactttataagttatagaagttataagtttttactatagacaaaaaaggacttgtatttatacctaagagtttctttatcgaatacgccataaatacattctaggtttaatcctagtttaaataagtgcgcgtttcctgggataaatatctctagagcctcttaattcgcgcttatatctcctacccctaataggatttcggatcacgtcacagctctggtaaggttatcggtaggaatacctatagttgtcttaactaaacgaagaccataggccttattataaaataaacgatattatactctctaggaagccgctaatcctttagtgccttttagagctagtctataaatatatatttaccttatactctagatagtgggctaagaaagtaacggagcggctgtagtatctatataaggggtagagactatctagacccctaaacctatcgattaatctataatctaagatatagctaagcctattagggtagagattttctaaagctaagattactatctaagccggccctttataatatactaatccgcgatactagaatagagttacggtattttctagtaataagtcgataataaagaagaatctagagataagtagtgtagttactatatcctaggctattcgtctactactaatatagaggataataagatcgcgatagtcctctatagccttaatagcgttaatagtataaggtatatttcctaaaggtatatctaggcggtaactattacttttaatagaattatctagatagcttcgctattttctctaatcgctatctgtctctatagttaatatctatatatcaaatccccggtatacaaaactattataaaagatatagtagaaatatagggtttacttattagactgcgcttttctagtacctaataatagtattcttatagaccctatagctataggctagatttagtatgagacctaatatataatctctcttataaagttatactttagtctactgtcctagaaggaaccgattccctatagatccgctagcgtaaaaaaacttataacctaatggttagccctacttgtataaaataatatataagatcgacttataatagagccgcggcggtagctcttactctagattttagttagcgcttaactatagaaaatagggtatatactaagcttaggcctatattcgctatatagttagtttattttaagtattatatagatatattatttagaagtctagttatattagtaaaaacataggtagatataattattaaacttgctatttttattccctaaatcattggctacattgaagttacctattataaaagtacttatatccctggaaatgcttgtggttactaccctgacctttgggctggagtatcgtggtcctagtagatcttcttaagtagtactaaaaatataataatactctctaaaggtactttttagggcagtatcgaagacctgtgaatcatagcagctattatataggagctatttaacctatttagctatatccctaaagatggatataaatctaaatacttagcgaagtagtagaggtaagatagaggggtgtcttttatagaaaatacgatataccaaggtattgaatcgctccgagtaatatgtaatgtcctatattattataaataaactaagggcaataaggctacctataatatcctttattaggtttcctgattctaaaaaactatatttatactataaggttactaatttacctaaacttatactaagtataagatctactatatcttatattatatataggtatagatattcctatactaaaagtaggaactctaatagaattaccccccttattctactactattaatagtaaggattatagggcttatagtcggtagaagaatatctactactaatagcctctagtagaggtaataaagatagcccttaattataaactaatactctagcctaggggtagggtttccgaaaacctaagtatagcggttatatactatatatctatatactagaatatattatatagaacgcagaaggtagactagataaatacaattgctttgtatataatataactaactactaaaagacttaagttcttctttatataaattcgctaaggagactgtattctctaagaatcgcttatataagtgtgaaaaataaaacttaactagatcagtttcttttataggatatacattaggctatagtaccttagaacagcgatatattataataataatagaccaatataaagttctaaatactatataggggttaatgactttctaatattagctttagcctatgaaatattaagataggactaactaagtatcttaggtatatagtagtctataaaaagtgtagacgaaattgtggtagctaatctagagagagagagattggtatagtagctagtcttaagataatacgctaaatatagctctatatataaactaatagggcgatccttccttatagcttttataaaatcgaacggataagaaatatcctttagtatatattagattactgcttgaaataatgctattaaatacatcctattcagctaagcttagttttcttattaaatagaggaaatggtatcgatctattctgtgattaatactttgatttattagaatcttatgatattagagaaattattatcttataggtataaagatatagagctagagaataatccagatagattgttatatctactttcttagattttccggtagagtaatcctatactaggcatacccctctcttcttttattatagatacgctatgaataaatattacccttagtaaatattgtgataaaaaggaggatatagaataaagctataaatagctgataagaaagtatatgacctttttaagataggcagtattattaataaagatataaactatatctataaagataaatattaactgtaaccatagtactagcagtattttagccgctaaatagttattctaaggaatgggatggctaacgctagtattaagtctctttatagggtataatttattggtatttaggatattactattagctaataatactggccggcggctttacaaagaagcgatattatatcgcagttttattagagcctcagatttatacctttttatattattcagaggatagagctattaaagagtgtgattcttggttttcctgctaaggaatatatataatgatggatattggttatcttagttatataacttagagaccacacatcgcagccggctgttatcctagattgtaagtgtggaatcttcctaggtgctaacatcaagccagccaatatctatcgagttttacattgtgaagtaaaaataaagaatctacgtctcttatgccttacggtacgaaatatttatatataaatattactccttcatatgacggacgtgtttcataactagggtgataatatagcccatatttacagtaaataaccaaacaacctcgttctcacctcatcttcaccccagtcctcacctcattctcacctcgttctcaccctgacccacatttactggtatagatcccagactacgtacttttgtcaaggccagctctcgcctccccaagtccaagaggcaaaagtcaaatagggataacaacaacagggtactataaccaataaaaagctcccattaaccaacagttggtggccctatcctagtcattagaagtctggcgcttaagagcagagctagatataagacccatctgcagcgtccgagactaatttttattttactaccttgccctaaacatatctaattacaagcacgatcatgactacgaagcgtctctggcactcaatgtcccagatagtccgtgggagacccataatccctttctttatcttggcaccaacgaaaacatgcattgcacacaagcagacattgactcatacaacgcattgagtgctttcgttcagcagcaggatatgattatggggaatgacggttttgagtctaaagcgtgcccggaatcgtctagggtctcttcaatgacagagttatacaggggtgggtacgagtatgggataaggtatccttccccccatgataggtcccaactagagctgacaaactagcagccaagctgatgcattattatcctcatcttcaagttgtccacaaggccccggggagattgagactatctcgcatacagatgaagccctatctgtcactctgaagcgatttacgagtacgataaatcaattcggtgcactttcgcaaacgcttggtaacaagatcgaaggcctaaatagccgcttcgacgatatggagcgccgtctggacagtatggagaaccgcatggacagtatgaagcagagcatggacagtatgaagcacagcatggataatttgtctcaggaaacggaaagcttggaggccaagttcaaatctgtcaatgagtatctgctcgaggtcataaggcgggaacagagggtaatgaaggaatttagtgacttggcaagtcgctaccaagagcaagaaatataacaggttacctagcacattgcaaattctataatatgcgttggtattttctgaaagagatgaaaagaagcccaacactataataagacagcactcggtagattccacagcttaagttccttcacgtccaacccataacctgaaacatttgacaagtcaaaaaaagccccgagctccactcccagatttagattcccaaagcattaggtactgctgctctgattcatgcaggcgctcggttgcctgggtgagggcgtcttctagggaactgaagatatcaaacaccctttcttggagctgcaagagtatctgtttggtctctttatgccactgaagctctgctctgagatagcccatctcataagcagtttcttccaactgggtcttgaaatctggcgattgtcgctttacacattgcaaccgggactgtagtctctcgaggttggacgatgtgcctccaagacatagaacttggtggtctgcaggagtaatttcctcggatataggatcgagacgttgactagtatatcgactcattgtatttgataaaaaatgcaatcaggactatagataaagagtttcgccctttaggttggtacagaaatattaaagagatcaaaggaggcttacagcgggaggcaatgccattcctaaaaggacgatattgacaatgccctctatcaccccttaacgcaagcggaggtgataattgacagggcaatataacgccacctacgacacaaaatatgcctcaacgtatatgccagtgcatcgatttcaatacccgcctaggttccccactctatagctgtatagatttagattaatttcaccacgtgattttatccaataatatgcgagtgttatagttaggatcgacaaatgaaaatacctccatagatgcacaacagcaacggctttatcgatagatacaaggatagcaaccaaactatcactttcttgatattagaaaagaagagatgatttacagttgacttatcaatcaggccgacacagtgtaactagccggaattttgggcctcatttacaggcgtcataaggcacgcaatatcgttcgttgccgtgcacatccgtatatccacctcgcaccaacccatggcgcaccgcgcttgccaagacctgcgagtctctccgtgcgacagtaaaaacaagatacgacactgaaaacgacaaaagacttacaacactgaagacaacttgcgacactaaaaacaacttacgacactgaaaacaacttgcgacaccgaccaattcctgcgacactgaatgctgtaaataccatggttagctgtgtatcgtcacaccctacattgtttagccactaataaaggaaacgagccctcaggtctttattatatgataaaggccaagccaattcttcaagacatatcttctaaagcccaatatcaaaatccagtggtagctccgccatctactactgccattcttcgagtaaagccgactttttatccacagtagatataacatttgctgattctgtttcaaaaatctaggacaatacaaacaccgcaaaatataacaatgacgtctttgtcttggtagagaagctgttacaccaagaccagtagtcaaagcattaccaggggctcttggagctcaggatcaacagcaattccgtggcattccgcagtatatatgacatttgctgattctgtttcaaaaatctaggacgataccaacaccgcaaaatatgacgataacgtctttgtcttggtagagaagctgttgcgccaagaccagcagtcaaagcattaccaggggctcttggagctcaggatcaacagcgattccgtggcatatcaaaaattacatgtctattgcgaaaggtcgctttctgggatgcagcatcaaaaatcgcagcttgaggcttcactacgtcatgccacggaaacctgtcaagcgttgtcccaaagccttcacttagaaagggacaaagtgcgagggctcgagtcccgtctcaatgagttgtacccagctgttaattcatggctacagcgattgagtcaatacaagcaggagtccggatgtgtcggtgatgagggaacaatggagcgctttctgctagagaaccaacgtcagcgagagttgatcaattgtcttcagtctctcctccacgcacgtgaacaggctgtgcaagaccttcaggctactctagaccagttgtctcaacaacccctcaaagggaacgcaggtcaaggtgggctatttaggtcctctgtttgttcgtcggaagaatcgaatgtcgaaatcatcacggatacaccttccaccaagggctgaggtattagacaaaggattttgcgtgctgcgccaggttcctcaatttcatttcctccgagtttacataagaatattcttttccgtcactagtaactagcctaagtaaaggtctcaaccaaaaacgagtgctgcgtctgtagcgctatatatacacctctggatgcgaagggaccacatctcgagtcagttcgtggtagacaaagttgtggcgttcaacattccgtgttccccgaaagtgaaactaggacagatcaggcagccttatagcgatcactacctaaacgaagatcactacctaaatggaggaccagaagctgccggcccattccgaacctttcattacaatgacgtcctgcctccaaccattccccggcacattggatggtagatcaaatgttaagaaataaatctttctttcgcctccttttcttcctgggcttttccctgttcctcaaagaaactcaatcatggtgacataagctgtatgcatgcatatcactaagacggatcgaaccgctcgaaccgagctttattaaagttttacacccctggcgatcctaaaggggtaatcccggccacttaattagaaccttattgcgctaacggtcccagtcaccaacggcgcgtaaaattccgctcacattggatattgcaactatttaggttaaatccgattttgtttcttgtccgaaaacgtatggatggacccataacgcgctgcgtctgaggcatccgcccattgcctagtaattcgcccacggttcaaaatacagtcacgacaaccgagtggaggtacgcacttgaggtccgttcgtgatttctccgactacgagctcgttgctttaattctcaggtcggccgaggcgcctcgtgattcttgcactctcttacccattacctgcagggatcgactgcagagctcagacctctgtcctcagtagccagtatccatcgacgggctcgactgtaggcacgaaccaaaccaggtcaaggtctatagaaattttgccgcggctctgagacagtgtcgcggccggggtgggagagcaattgtaaaggtcggcggcaacactctggtagccagaccggggtactagaaacagtgtcgcaactctttcctacattattttaccacagagtcccagctacacgggagttaatacttatttcaccctagggcaggtacaatctttttttgcgctcttcgataagttatatcaaggctctccaagctttgaagtaacatgacaattttcgcggatctacctttcgagctactaagactgattgtcgttgacctcgattactactccttgagatcgttttcgcttgtgaatagaagatgcagatcggtcagcaccttagatatcttctatatattcaaagtcgagttcacagaaaaagggataaagaagctaaaagggctcgcaatttctttattagtataatgcgtaagagtacttcattatgatacattagaattggtcgacctatatatatgattgttcagctctttatctggctccttactgatcctttcagtaatcctatattgggactatttttctgcttatatttatataccataggagtatacaagagattaggaagatttccggtaggagctccgaggaaagcaattttcctataaggcaatatttcgatattttaaaggacttacaagagcttagagtttactcttgaaagagcggacggatatctatatatttacagaattacttcggtatctctctaatctaaatactattaagctctccttctatagagtaaaggaagatcagcttctttggttctttaatcgagtatttcttagagacttacttttcgtttaccttaaggcagtacttaggggtatggctgttactcagtctataggattaaccttaaaatgtataaagattaataggatatattctaaactggctactaaagataataatatcctagaaattgtaaaggctgctttagcaaaagttgagagcttaacgctaatagaaagcccggggtttctagggtttgtatcctctgtccctttaccttccttacggcggcttgaattagcaaagtattggcttataggctttaacttaagaaagttcctgaaagcctaagatgggagagtgctatatacatatttcaaagatagaaatcaattgtattatgaaatatggaatatggatggcgagtctgagctcaaaactttgtctgagtcctttatctgctctaggaatattggcctacaagaatgtcttgtacttacaggagatcgtatatgatcgcacaatttcaatgagtcttttacacactctccagaagaatgttcacgaataatccctgagaagttagaacagttatattgcgtcccgaaactggtgtcactacctacactcttcgattggttctcggactctaatgccaagatataccattggtatacagtgacggtgcataagtttgaacaccctaatactgcccgccctaacctcacccaatcaaatatttaaaaggttgatcggcatgattgtttaagggctatttggttaggcggtgtgtttctcttggaaggcggtaaccaaaggggtgctcaaattatgcatcgtcactgtagttccggaatatcacttcatgtattgttaccgtacagtgtaaatgttatcgaaggtttcatagaagtaaacaagtcaaacatgagctggggccttgaggattcagtaacgtgtcacttcatctgtgtacttgggttaaaactaaatgcatacctcctaagactgcggcacctaaaacgggtcgcagaggaagtagcaatatataaagcagctgagccgttctatcattgacacctgatttcgaccgagatggatgaacaaattcaacttccgggtaataaaaagcgggctgtttggcgatcaacttgcaggacgcgactcgcttagcatatatgtaagctccacagattttttaaaattaaacctactaatatctctgactagttgagaggcttgatcttaaagtagacccttccgaggtccgattaaagacagaggacgaatgtctctatatatggcagatagatgatctatcgcttgagcctctttttcagaagtatatgagtaaatactcggtgggggcctacatacagcttcactgcgaggtaggtcaaacgttttatacagttcctgcaaaggtaaacttaataaccctttaggataattcattgaacttataagggttcttatagcgcgaaaagcaaacggaccttgaaaatgttgcttgtatataatttgaaaacctcagtcttatagagaaacttagggcagccgaagacaaagcatctcgcttcgaggaggcggcaaaacaagcggaagccgagataaaagatcagaattcagtcatttaggaagcgcaaatgaccattcatctttactagcaggacattttgaactggatggccgttgccgagtggtatcagaccaaatgtttgcagtgctcgagtgtattagggcaaatgatggctttcttataagacactacatctgagaccaagtgagaatcgctgttggagcttcatatttcgttgaggtacttttctatagtcttatcttgaatttaaagctttactgccatcagaagttttaagatagttccagctcgtgtgccagactaggccagaatggacaaaaatatgctataacacaattccttttcaaactggtagcccaattactatagaaatttggggatgaagtctctcacgaaacaatttgtgcatgcatcatcgtccttcgcagcatattttctggcctgcagcatagctttcaccctgcatcattatttctggcctgcagcatactttctggcccgcagcatactttctggcctgcagcatgatttctggcctatagcatagttttcaccctgcagcattgattttgaaatacgtataatcaccaccgcgggcttgaaatataaattgagtcttttttctccgaatacagggaagttgactaggcttcaagaatcaatatggttaaaaagtcgagaaagaaggcccaaaaggcccagcgaaatgcccgtgatatccaaacacccgcacccacggaagtgagctcagactccgaatcccatcaacctgaatcctcgagagcacaagaattgaggcaagagcatagctaaaataagaagggcaaagctcccgaacggaaggcgagatttgttagaagcccaacactcccagatgactttaccccaaatgcgggtgaccacgaatcaaatgacgaaacggatagcgaactaggggatgcttctaatcaagatgctcctattaaacataaactagacccgctaagccgctaggttaaggatatcattcgcagcgagatatcacaagagtcggaaagaatggttaaggagttcttcacatccccaagccctcagtacgaaagatatcaacaattcttttaaagactaaaccaatacattcggggcgttaataaagaccacaatatcaccgaccttaataccggtatcatccccgagtctggctacaataccctatataagacctagtaggaagaagtaagtaaggtagtagtaaaaggctccttagaggagttttaggtagcttataataagacacgcgctcttctaaagatctttaataaaagatattatcttcctaagaactagaatatcagtcaagtataggccgagcaatagatcggggcaacaaatcctaatattatagaagataccgactctacttccgatagtggcgagagttagcccgactagactcgccagcccttagctagtaaaaagtctagtgccgaatcggatattaatatcgacggtaattagcctataggacttaataccctagaagcgagaaccataaaatagtaataccaattgtactcggctaaagtattatattagtggcctaaaggtactagctctcagatctttatacgctacggaagccggtctatgccgatctatcgtattcaggctagattatataagagctataacccaagtcgggttaaacgtgttttaaccacgaagactcgcggcaccgctaaagtaaccgggataaggaacgggcttcctgaggagttttagaaataccagcgaaaggacgtggaggacttcattggcatcggttggaagatcgaagacgatgataagtaggggcttaatcctctcaatctgttactgcccactaaaggcatagtatatccacaaactcggatacttgtcaaatagaaagacggttagtttactttagaagggcgaactttcatccgtcgtatcacagccggctctgccttggatggtgatagagtgatttatcagaaagccgaggagctcgaggatacttatcgcagaaagcatggcttagacgatattgatgaagattatgatagtgaagttagcgagcctatacgctactcgaaccaacgcagatcaaagacgaggaatcactttgaggccagtgaaagtagcgacgatgggagcgacgcctctattcagtcaagtcacaaccacaacagaagataccgcagtgagccagctcgtggcctagcctcgtctacacagggacgaaattcaacttataagatgagaaaggactcggcgacagagataaaagagcttgagcgtcggattcggctcctgaagatgcgcagcccgatacccactcaagaaacgcaagaatcgcaacggagacgacgccgaggtgaccgtgggcgcatagcataataagcacttgtgattttatacgttcctttagtcttgttatgagccggtgttaagccgaattttttgctttcgtattgtttctgatgagctggcctcacatattgctttcagtcttattttatagtttagcttagcttagaaattgccagacttgccttattttctgaacgattgcatcttcccatagtcctcttctatctattatgcttacgcattaaccactatgggcttccttatgaacttttaccatccatttctgcattccatttataaatgatgatacaatgttttctcgattggttctccacctgtatcgcatccctgttaccgttaaacaatatcgatagagagacatctatcctagaccggagagtttaattgctcgacgtaagtgggcttgacatccaaccatacaatgctactcaccagtgtcctatcaagtgccggggctatgtcagacactgttagtcttaggtataaagttcttcccctagcccgttgcttactgtaatattttctttttctcttcctacacccgtctggattaacattcctccgatgtaaacaccgggccacgatggcaagccattccaacactattattatagccgatgacgaggaactgccaaatctccagccaggtagctcacgacctcggagggcacctcgctataattacagctacgaagattccgagagcatgtttatcgatgcagccgataatgagactcgatcgcggaaacgcaaaagaaccgaaaagaagaagccgtctgctttggtacttgttcctcacaccctcttcttcgtccttatctaataattcattaggacaacgctttccagctgcttaacaaggaagtccgccataaagtaaaacggttgaaaaaggaaaatcgaatgcgtcaagatgaacttagccaggagaaggagaggtaccaaaaggcgcaagtggatctttccagggaaagagaaaggcgtgttttggagtgcaagatctgttatatgcaaccagatcactgggtgacaattctatgtgggcacatggtttgcgagtcgtgcgcggaaaagctcgaaaccccaaagagttgtcctatctgccgagcaccatccacaggacatatcaaatgcctaccctttgcgggataaaccatgtatatcatgttctggattatctggactaagaagcgtctattttgccgcaaaagcatactgcaggatgcgaatatggaacaactaatttccaaatgatcgagacgccgtcacggtcaaattactttcaaatcaaacttagctagacatgctctcggtattgaatctggaaaggtaagcgcgccgtatttactatggaccgcaaaaaaccttgatgcaagtattctctgggatggataggggaaatgggaaagaaaaccattggttgcattagctaactaagagagaggagtatcaaacactagggtttcttagaagactatctcaacaattcaagaatatcgtatttgttaaacttctctccaagacatggaattaagatcaatggttctgcgcctccgatagggggtggattcaaccatccaccttgctcttagtacctctcatccaagctatcaataagaaccggttcgaggtcatcgttgtactttcagtgtacatcatgtggaagctctatctcatcaaattcaatttgataatagtggttcttctcgagcaatatatatcctctttcgcaaattctcattctgcgctattctcttcagataattttcggcctgcttttgttgaaggctggtctcgggggaatccggatcagatgtttcaccgaggaagaccgatgtattatcgtcgtcgtcaaacttgaaaatttgaccgggtcgagatagatatagcagaagatcgtggatctgcctatctccggatggtggcatttgtaaagtattccgcattatagcggcaaaaaaaaaaagaaatcctaacagtttctgatattcctagcagggagttcgagaactaggagatggttttctttattgacgatggcatcaggtgcggagattgaacgatatctaagaacttgtccacgtgacctgggtctgctgacatggatcaatgtctgatacgaatcactcgacgttaggacggaactacttcccatcagaaattgcattcgtaaatacgggaatatcaatattccgataccacttttgatatggattagcgtgtctttgggcagatcatctggtgcattaattcaggtgctagttacatgcggtgttgccagaggttcctctgctcttcgaagtccaggccttgctgcactttgtctcttatgcacacgaaattttacagaaaaatttcatggcaaagtttgtttgtaaaaatgggtttggagttcgtaaaagcactccatttgggcctcaaaccagttgatacagcgttggtcatttagaatattgactgaacccgctgctatagtgtatttggttatcatttcacttaaagcatgaaacgcggtctcagcatacgaacgaccgaactcggcagcaaaaagtgaatcggagtttaacaaccgtaaatggctcagatcggtgtggtgggatttgactcgtctaacaatagcttggtccactgctaggtcaaactgacctttgccaagtggaatagcaatgaaaaccttgctatcctcccctggcggaatatccgtggtgaaatgagcgagggcaccatatacgtcggattgttggttgcaaagatcgcatttaaaattagattagatacgcatagtctatgtggttggctttagtaacattctggtaggtaaggaggatatacactgacttggagtggttccatttgaaagaacttatgtgctagtctctgctagcgtgattggaacccttggtgttcggcagaaccctgatttttctgaggtggtaagtagcttcttataggggagaaacctgattgtaagcaataaacggacaccgccaataacgcacaaaaatgtccaaaggtcatatcgtcctaaaacagtatagctcagaatgcatgccctacaaagacattattccatccccagaccttaactagcgttgttactcgttaaatctgtcaaggccattcggtatgtcggttgatttagccagtaaccacaagcggtattgaggtggcgatatgaaatgtggcaattcagctgcaaatttgggtactaagaacgcgaccctatgtccagaagtagtatagctcagaatgtatgccctctttccactatatccccatttaatccgtgttggtcaccgagtatgccgtgcattatgacgctgtgttccttatcgccacgtaggtccaaattcttctagcgccttccttataccattactctttccgattttctcatatttgtaccacccctttatttgcttcccttgtgactcaactacaacacgtagatttgcttcgctcaaagccaaagctcccggatactcgatagacaaaaccttggtaacatttccctttggtggcgcgggatcacttgcttctccatgcggcgaagcgctaagacctccgctgaggcgcattggatcttctccttgaatagatactccaccataatgaagtctcatgtctggcgggctacttggctgtccttgtatgttcggagggtagatcttgcccggttgagtctcaatgttccccaagggaagggaatccggtagttctgttgggtaatcttcagtgtcggcctaagcagttagtcaatttgttttaatctgctaaacagagtttgcccataccttcgagaccccgaaacacaccattagtagcgtaaagatattaagccttgacacggatcggttcgcaaagatgtttgctatagttgatgggtagtatatggatccccggttctctggcaagtatagcttatatattggagccattatcacaaagatacccatttcaggggcatgcatctactatcatagagcctaggcgggtctatgttctgagtaaccaactaaccctgcggggatgcattctatgctatacccatttggtcaccttctaggtttctgagtcagcggcaggggggacttaaccgacctgagcgactcccactttcacgtattgacaatgccgcctcgccgtaatcccccagtaactgcggagtgcctgcttcatgatctatccattcggatggaacatttcaaggtttttggaagccgacctctctccagctattgcggaaaccagcacagccgtggattttatttcacgtggtgcgagctcacacttatagatcgtgcgcctacaaaccatccttcgatggtcttctctagccttagaagaggaagaatggctacagacgtaaggattagagcgtgcatatcctaagagacaggtccgcggtgtctagtcgataccgtctttccttcgttacctagggcggttaagcgatcataatgcttatagtgctcttcaataggggcgaaagcttagaaggtttaagattgagtttagtgagggaattacacttctattcgccccggtcttacctactttccgccgattatctcttatcgaagaagctaaagccatacagcttctaagagctagccatactaatattcttattgatacacaacgacttctatattttaagtctaggtatcaggcattggtagtaactcatatcctttattatatcttataactaacacaattctttatctaggttctgcgtctaatactaccgattccctaggacgcgagctgcctaaaccgttatgaattcaaaaacctctggcccgtacatatcaggccccattagtgcgccagtgctcccttactagacaaaggagcctccagtaggaacctctatctccattctaaccgatccttttacgaaaaggatttcgttcggccgtagcttccgcttaactggttggctttcccgcgtttcctctttcgttaaatcctataggtatagcatgaaagtcactctgatttcgtcgatattcgaaagatcccgaaagacagataccgcaggatgagatgggtgcgcaagcctggtgccccatgagtgtttttcggaggagataacgataacggggccttaacgacaggtaaagccaacttcgcctatagcctccttgattttccgagtgaacttctatttatcagccttagtttaatatactctttggcaaacctactacgtcgctttcctcggtcccacgccgcaaaaaccgcgcacatgtgtcagcatctcccctaccatagaccaaaggggctttttctacctttggccataagtgtagagaccgcttcacttcggaatttatgtcggctccgtcagaggaagctgaaaacaccacaaagcccgtgatctccattccggatagctcattgtaacgaggcgatctgttctacgctgttgtcatgtttgcgtccctgtaataggcctaaacagtctagcttgatagagaatagtcgcaattgaaactgggaggagggatagaaaggcaagacaacgagacatggagctttatatatttggcatgtttgaatcgagatgattctagttgcatttctcgatatgaatctggataaaactagcaaacacaagtattgaccctgagagttgtccggaaactcatttccccactgggtttttccactccactagcgtaaatacgagaggttcgtagtttatctatagtagcctgacttgtaagaagaccatagtactcgacatagaaaccgcattttaaatgcataatcgtccccattaagacgcctagtctacgccataaccgaatctgcggggtcggccgccacctaagaaagccctagctctgaagagcctatagctgcttagttaagcgtgagatagtatgacctcggggactaattaatatccaaaatccaaacaggaagaacagactgctgcattgaaaactagtaaaggaaagctttgttaaggtcatctgagcaaacaaccgcctagtcggccggcaacagtaggcatacccggggattgaatgagcttcgggtacatattttgggcaccaacctgattgagtacaatgaccaatgctaccctatcctttgaaagtctctagagcttctgtcaccaactttagactggctttcctcgcttgaactttaatgctaaccactccgacagtcttattcaacccttgaattgtttggatcttctgagcagcaacctcttccaaccatgctttatcgctttgcaaacgttgtatatcactattggagcattcgcctaagaggagcaaatcatatatacaactcttagagcacgctctaccgacgatcgtgatcaaaagatcctcagagagtatacagcctgagaggagcaaatcatatgtacgactcttggagcacgctctaccgacgaccgtgatcaaaagatcctcagagagtgtgcggcccgtgcggcccgtgccgtcccttccatatcccggaggcgggtgttgtataaggaattcaaatatttcagcgctctcccgctccactttgtcggcagctgcagatacagcttagcgccagtcgtcgtggctttcggtatggttcgagatccacacgactccggccacgcagttgcgtctcgccgcataagtcaagaggtcttctgggatctcttcgtcatggctccagaaccaacctaacatcggttcagggttttgttagtataaaagctgataccaattcggaagtccgttatttggattggggattctaagatccacacctcggtgtagcagctgatttgctagatctatatcggcaaatttgcacagattcattatctccgttagcccaagagttaattcaatttcaggtattgatcgaagacgtttccagcagctctagaacaactgggcatcctaggtagtgaattgtaatatcgtcatgtgtccctctaccgagatagatttgaggaggtcgaggggctctatcgcagacattgtccgctctatcaaatcagggttctttgaatttgccgcaatcagatagagggtttgcccatcccgataaaaagaggagggacgaattgtttgataatcgagtagaaacataaagcactgaggacaatcgacgattgcttttaaggctaaatcatgcggagcggttttatcgaaagtacgctgacgagtcttcgtatggtcaaagtcagggtagagttcccaactagtctcaaatctcttccgaagcgaaagtcttctaagaacagtgtgaatcctagttttgaagatagagtccttctcctcctggcaaaaagcttgtagagtatataaggcatcatgtgatccaagcggctcggaaaaaacactagcctcgataatggaatctataagctctgttggcaatttttcgattctcccaaggatattgtctggccctagagaagactctgcattctctatgcctttatagacagcagtatttactcaagggtctggcatttgccaaaagttgatgatttttggaacctcgatgtttggaagctcgagtatgctgtctgattcggcgtcctctataccttatagtgagcgagaatactatcattgcgcgtatttgtgcaacttacgattttcttgatctccccagactgacgagggattgtcttgaaagaaaaaaggaccaacccacttcggcagtaggctttgtagcgtgagtatagggaaacaatccatgggccttttttgttgcagttatctagaggcatgaatacaatcaaaatagaagagaagctcatttatgtttatatgctcactaactatagcagtacggtttgatataggaaaatatatccgccacttgtccaatggtaggctataattgacaaagagccagaccttcttaccgagctaatatttcagattttatagatcttgtaactaaacagacaatttaccttgaccctaaagggcttgctatgtcgagcttcttctgtctatcccaatctttgcctgaaccatatgtgagctatggtatggaaatatttagaagtaactagtaaactggaatgtactaggaaatttagtatggaaggaatcgaaagaaataataaagtatcagaatacggaaggaaatcaattattatataataaaatacagagtgtaggtactaaagatagaagtaaaaaaggttgtattaggggaagagagagctctctatctaactatctaactaactatcataagggtgcttaactagggcaccgaggcatccacagcatttatgccacgtcgagcttcttctgtctatgccaatctttgcctgaaccatatatgagctatggcacggaaatatttagaagcaactagtaaactggaatatactaggaaatttagtatagaaggaatcgaaagaaataataaagtatcagaatacggaaggaaatcaattatcacacaataaaatacagagtataggtaccaaaggcagaagcaaaaaagattgtgttaggggaagagagagctctctatctacctatattactaactgccacaagggtgcgtaactagggcaccgaggcatccacagcatttaatattgctcatatacgtcaaatgggatgatatcctgtacgtgttgtggcagggatacatggctagagattggcataaaggcagactgcggagctgcggttctgatcgagaacgccctgggacgttagctgattttggatatatgagtggggaacttgtgcttacagataagaagtacttgatgtactctgggttgggcttgattatcacttcgtcagtcattaagccatgaaagaagaatatatcacccactcgtatacgacaagtctcagccctccaatttgtggatcgtccgagatatcttggataacctctgaattctgaaatatagccgcgatggaatgagaatcattcacgggagtgagtgacccctcttcaagcctcactccagtgatagtttcttcgccccttattcttttgtcagataaattggctgtgctgccaggagtcaactcacagtggtgtgcctgttgcatcatattctcggtaacaaattacgaaaacacggcttacgtcggcccttaggccagataggccttggctaacattgatgatgctaattgtggacgatgaagacaaggaaataccggcaagtctctcttttaagggaaaataggaagtcttgctgcgagaataattatctgggaatgagacaatttatagatttctgtaggatcgcctaatttgataaagtaagcaacggagggggtctaattcgaaacctcaataatcaaggttcatacaatggagcgttggttgctttcaatggagatatgggactcgaacttatctcccaccgagcatggaaggccacacaactcataacgtgatccatcacatcatattcattgactagataatagtcctaaaagtacattctttctccattcatcggagaatcaacatctaactatgagctgaacaaatttcatacaaaaaacaaccatctgccctaggcgttcaatgattctactatctcaacggctcgaaatgcagtggccaaattcccatagtcgagctaacagagatatcatatcctttctaactagttctctaccctaatatctaaattatctataagataatatataaggtcctccctattatacgagtaaagtatacgcttgattgatatacgtagggaactgggcggcaggatatccatcatcagcagactgtatagcacgaccatacattccaagtccgtattaccagcatttaaccccattagattcttaataaacgtcggaggggcatatcctatataccgagaaagaataccggatagcagatcggtagtaatgggcccatcatcacacagggccgaagagacgatataagtagcgacatcgccgtattcaatcataaactaagggttatccatttcacggactgaatagttagttagatatctgctatgtattagatcaaagaaaaacatacagaattgacttataacccgtagcaattgcgcggtgaggggcttggtaggtattattggcgttattaacatagctaaggaaaagaggaggtaaaatgccatatgactggaatagttagtagaatagttacctaggaacggagacactttatagctttctacaggttcgcctaattgataaacataagcaactgttggggcttcttcaatataaatcgcacgaaaacagacttgggcgctaaacccgataaaaaaaatggcgagttcttgtaaagatgcaatcgactccaggaaattaaagggttatgatctataaagagcatgaaggagggaacacctttcctaaaagccttaagtgattatttaattggataattcctacgttactcagcaattttagagagctattgtatcgatattgccagtccaattaatgagttatcattcaaattcacaccaatttccttatagcttcacgtgctcatcaatggaagcgagaataagccctggctttcaaacctcaaggcttagccacacgacacttgccacatcgatgcctgaaattctgttttcttagtagcacttctcccattgtgcagagacctttggtaaccttatcggcacatggaaatggcagagccgtttccacgcattcacatccataagtataggtatattgaaagcacatgatacttcactataatctatattagcctccgtctatacaccttagattgatggtatcgcgaaccttaataataaaggcctatacaacggtgcgttgattgttttcaatagagatgtgaggctcggactatttgcaggcgaagcaattcagcacagagctaaacacatagctcgcgggctcttatacctaacttcaattgtagagaaataagaggcagaagtgcatagaatataaggataaaccaacaatagtgcaacggtaaagtaatcaatgaaaaatgttcctccttcaatccggatgtagggcaagggatatatataatacaagcgaagtttctcattccagaagcagagcttatgctgccaccaatagaacctcaatcaagcttgaatatcaaccaagtctgacttctcagcattactttggcggtggaggcgggacgcccagcttcttgacgcctgttgtaacgtataggccatgtatttcaagtcactgtcccgacacaatgaacagtccacgtatgatataaatagcaggtctcaagtacaattgatatatatttgtgattaagagatagaaaagtccatgttgaaatagtaatgaaataagcttgtgctatatgctggccgcagatttcgacgggagacatttgatatttaagcttgcggagaacggaagaactatctaccgctccccggagattatccgcctttcggagcgtcccaacgagccccgcgccacttctgcccaatatcatctttgcaagacccttaacgaccgtctccccttcatgtgagtaaccagagcatgttgcatcggctgtactgataaaacttcaatagatttcggtgcagttcaactacattcgcacttgctcctcgcaatccaagcgcatatctatggctacgaagggttcggatgacaacttggtggaatctttggcgataccttcatctatcaaagacatctacactgaggcttgcgaaaatgatcagtctctagcagaatccctatcaatcccttctgatcggatatccgccactatgctggtgcaaggcagggggagggaggtaatcgccaagattgaagagctctctttggtgaggatgcatgattcagcttcaatacaattgggttctgacttggaatagaataacccgattcgaaaagagcgccgattaaaccaatacggaataagacctgctctccaggttttctcctcaggtgtaaacatagttggccaaccttatatggcaattataccgttttacatcaagggaaaagtgacacttggcgaggaaacagttcagttggatcgctactatcatgtgtatggtgaaagtcgactggtgattgagaataacgcgaaattagggatttgggggtataaattgggaagttagcattatcgcctcattaagatacataaagttcctagtgagatcatagaccgagattgtgtagtggggcgatacgttcaaaatcaaagcaagacctttgggcaatatcatccataattccggaaatattaataggttggttggaaatttgttcatagaaaaggtgcgcaaattcggcctcgttacaatcctctggatttggcgattcggctccgttgctagggatatcaacgtttgcaaaccccatgttcgatggaaccgaatcttgcggaacagaagtatcgatacgtcggaacttctgtctccctgattccatctccgaaactcggctataacagaacatcacttaacaaaagtcagcatggagtaggttaactcttgagcgaagtcaactcacaatcgtaggaattttgcacttgactaaaccatgggctaaggtctcgtactagatcgagcagatgtatcttgctctgcaaaatcgtgacatatatgtcgtctgaaagtagtttgtccgcaaagcgatgcatttcatcatagcggaatcttcgaaattgatctatatgcagcccaacgatggcggaagttgcattgcatatgcttggcaaaccattttcttttaggcgttcggaaatgatcttctcaaaaaccatatgcttaagaccagctgataaggctttcgagaagaaactgttgttcccataattgaaaatattggtgttagaaggactcggagacaagatgtgttgataaatttcctcgagtttcgttggataaacttcattatctagctgctcgtttgtgaattccagagcaatcgatctcagtgcaagaagtctcaagagcttttcctcagggccaagtgttcgatctccttctaggcgccttatgtgctccaatcgaaggtcctcgtcacagcttcgcttgcgagatagtaggtgacttggtaacttttggccagcttcccaaacccaacttgctgattgctttattcgtttcaacaagtcagggacatggtctggtggtgaaagagcacgtatggactctgcgcgtatagcgctaccgggggagtctctggtcggtatcaactgggcggttggagcggaaacttgcaggctatcgaagtgaggtgtttgtggaaataagacgccttgatcgctgagtgccgtcgtttcagcaacttggaaaggttgaggtgaatgtgggggagatggcacgcttggggtttccttgggaaaatgatcggtgaacccagcagtctgaagaggttgaggagattttgaatttggcacgcctgcttggtctccgggttctgcaacttgatgaagttgaggtgaatgtggaggagatggcacgctttgcaggtcagtaagagtcgcctgaaaaccaggtgtcgagggtattaggttgtgctgaagacgttgaccgactctcctaagcgtcaaaatggtctgtgttgcatgcgagtgaagatcgctatcagatgcattgcgtattgtctccaaggctactagaaggtccattttgataagagaagagatgggatagttcaaaattacattctggagtcaggcttactctttagttttttaccatgagcttggacccacggtcgacactgcgaacttctggcgagccttaacctcagtcgagtgtccaacttcaaacgtggttcctaaatggtccccgctagctagaccagggttcggacccacattcgagtgttcaacatcgaaatgtgggtccgttttgatctatttgattagcttctacgtacgcgcaaggcgcggtaagtagttgaaagctgggccttcgcttgtgtaatcgttcgaacgagagcgattcgctaatcacaagattgcgcagtccgcctgcattatcacacgcctaatgtaggcgacctgcaagtgttcctcactccttagttgggggcggggccatttcattggacagccttgttcgaatacagtggagaatacgggcacacctagcctggccctaattggtatatcatatcaccaccgcgtgcggggttcgcactcgttcgtccaggaaatgatcggcagagtgcggagatacccaaattggagtgagttcgtcttcactatccctgccgtcctgtgggttgacaagattggacgaaagacgaaggaagatattgcaggcctctcctcttttttgacgtgtcagaatcagttctctattgacactaatgcctctattggagggattgaattgtcatacagcgtagtacattctggccaaccgctgttggtaatgtgggagaaaagcccgttcatttcaatttggtttgttatttgttcccacgcttatattaatatccagtctgtcacccctaagagggaaaaagctataaagccgttgaagattccttgtcaggtaacatcttctatcattactaccatcgctcttgctacacatcctcttgctacaaaccgccccgccgaaaagcccatactatcattgagaatcctcagtgacctcgtaccgtcgtcgaatatgaattgtccaaatcaagcttgcaaaaagggcaatgtgaccgggagaactcactgcgagttctgcggtaccgaactcccaggatcgatgtatcaacccattattttggaaatggtacgtctcgataatatcccggcagaacttcaattccaatctcataaatactagaggactaccattgcttgtgagcaggttggtacgaaccaactgtgaaaaaagatgatatctcggagtctgcgttttgcccgagacagtgccaatcattatttttactgtgaacaatttgtggaacaaagcaatggctctcttcgattcttaagtttctttctctggcaaactcgaaccacattcctttagaagtgccagtcctctctcatttaacttaggatagttgcgcaatgcaaagaaatccaaccaaaaattgcgggcctcagtatgatccggtagatgtgtacaaagcaagtctttccattctttatcatcttgccccagaccaattcccgcacaagtaaattcccaccaaacagggaaaaaggccgaagattcccagtctagaatccctgccagattaccattctcgacaatgatattgacgttggtcaggtcgccgtgagtaaaggtatagggagtcgcagctggcatccgctgacgtaatttcgaacgaacttgctccggaacttgagtcaaggccaacgacatctcagcccataattcatcgtcagatgaaaatggtccgtgtccaatcccatagccattcggaaaaagaaaggctgagtagattgggtgcccgccgatgctttccagtcggtccgagcgaagctcatgaagctgcatcaagtactcagcagtctgttttgcgacgcgttctttgtcggccgatgtcatctttggccaaatttcactcaatgtttgacctcgaatccgtttggtaaggagaaaactagccccgtcgtcttcttgccattcctcaacgatttgaggtataggaattgaggttcttgacgccaaaaacctgacattgggggcctcaaagttaggtgggtcggaagaccgttctttcaggatcaagtttgagcctaacgaccatacccctcgattgctgacaccgtagaagagattcacgtgactctggtaacgacatgcgtcttgacgtgttggagaccagctacacgctgaacaggtattttcggtggccattttgtaaagaaacgattttttctaaagggatgtcaaattttgggggagtcaggagcatcaaaggcttttatactgacggaaggaagggggcgatcggcgcgacagagtgatgtatcatacaggataatagtttatccgtaatattcccaattggcaataggttgatttattttccagcggagtggccccaggcgcgtaatagaatggccttggcacattatgccagtggatcttctaaagaacaacaaaggctccgagaagcggcagagtgccgccagggaaaagacgaatggcgactccagcccaacacactgtttggattttcgatcgctgccacatctctctgctcaagcgatccgacgtgagacggatacgaccctcacgactcagtgtagggcgaccgacccagtgaaccgattttgcccgcagcgcatagtccatttgaaacctgagaaaatctaattttggtgagtgctgcggtctcttgttgacgtgggggatattgtcatacttccagatgctaaaattagccagcggaaaccttgtcatttctcggggaatacttctaccggaaaccgtgatcagctgacatcagcctcccggatcaagcgcccgccaaccgagacctatacctatcgcgattgtctcaagggaccaacatcgatggctgacagcaactcgccagattataaggctctttttctgcaggcggaaaagagactcaaagaggccgaagagcaacaaaaacaggccgaagagcgacagaaacaggaacaagagaggaggaagcaggctgaagaacgacagaagcaggccgaagatgaaggcagacaggagaaagagagacgagaacaacttcaagagctcagccgaccgaccactttcgcggaattcttacgccattcgcatgacctgctctcccgaccgctgagagtcgagacaccatctcgctcgactaccggcaaaataccccttcccactgggaaatattgcccaacacgattggaacactggaccgactgctcagcactgcagtcggagcttttcaattccgtctacagctatctccagttgacaccaggaggctctccgcgtttgttttcatccttgcatgagctagaaggattaggccgacgacttggtcgcaagcccataagcagcgagcaggaacttgaggcctatgagcggttcgccgtagaagagcacatcaatgatataataacggagttgtgcaagatacccgctgctcgcgacgagctcggcctcggagatagcatccagttcagcaatcatacgaattccttgaatgataacgttgccattgaagcagatacaactcaaccgtcaagtgtataccacccaagacctgaccaattctatatccatcgtgtcgaccgcaacactaccactctcctcacatcggtcgagtataagccgcctcacaagctttctgtcgccacccttcgtatagggctccgaccaatggacttatggaaggatatggttagatcaaacaaaataccgactaaccaggaagcgaagctaaggtacaatgcagagcgacttgtctgctccgctcttgtccaggagtatcatgtgatgatccaggaagggctcgagtactcctacgtgaccaacgggattgcccgggtcctccttcgtgttccacacgatgatcatagcacgctttattacttcttatgtgatcctaacagcgaagtgagtgcagaagttgaagatagtttccaacaaccgaagacttctgtggactaacgggattgcccgggtcctcctccgtgttcgacaaaacgatcctggcacactatactactttctatgtaatcctaatagtgaagtgaatatggaaatggaagctacctttgcaaatacttctgttgcaagaacactgtgtttgtgtctgatggcattccactcgccagtgcgaggtcaggagtggaggaattccgtacgaccagacattccaatatggaagaccagtttcgatcacactcgctctcatattcccgaagacgaattccggcaacttcctctcaactctgacagtaccgccccagaatttccaagcccagattctggttcgacttatgaaccatcgtcatctccgccagatttccctgaatcaacagctcgtcaagtgtctacgagatctcgagttagctgtgccccatccgacgtgaggcatcgctcacagtcgtcacaatcgccagaccccgattcgaaaccagcaacacaccacaaacgaaccttcagccaagttccatcttccccatctgcccaacgcgtggctcgacaaagagatacaaataatgataaaggaccagacagccagtcccgccaccgcgatgcgcaattttgcacccagcgatgcttactcgggttgcagtctggcggtcttctagacgactgttgcccaaatgtgatgctccatcgtcgaagcaatgacgatccgcagcatccgattacgtccaaggatttggtgcgtttactaaaagcacaattggacgaaaacattgaccgatgtacaccccttggaggttgcggggcatacggtgcgccgttcaaacttacttgtctcgtatatgggtataccgtcatcggaaaaggaaccacgtcggcgctatggaaagaagtctctcgcgaagcggaggtataccgaattctgcagaaggcgcaagggtccgctgtgcctgttttcctgggtacgatcgacttggcgaaaatttatttccttcacggggctggagagattcgtcatatgctcgtgatggcctgggggggggaaagtacggcatcgatggagctgacgccacagcttctgcaggggatccaccaatcgaacaaggacatcagagcattaggaatcatccacgaagaccttcggcgtgacaatgtcttgtggaatgaagaacttgggcgagcgttaatcattgactttcaccgctccacattgaaatgtcaaccgactttgcggcggccgcgagtctcaaaacgacgactacctcaaccagagattgttgactcgaaacgtcttcgtgtgacgtgaggatgggtgctcattttattggagtagcatgaagcattttcggcccgtatccgtgtggacagttctttgagggctgtattggatctgcctcagcttgtggaccggggatatcaggatcccggtctcttagctgaattctctcttcaagaagggttgatcttagtggagaatctgcctgaatgttgacggctgtagatcctgaagccgaagaacacgggcctggcgtcggcgaataagcagagtttggtgtattcggttcatcgttctctggttctctcgctgtccgtatttggaaagcctgtgtacgttgcatcgcccaatctgcagaggagtcttctgtcagcatttagcagctggaaaaggcagtatacttacttgagtctaatttagatgcaaggttttgtgtcgaattttcaactttctcccacaaatagtcaaatatcttgctggccagagcatcgatcttctgctttccttcaacgcgtaatataccacgatcccgaaggtgcttaatcgcctcagatcggggtttctgtctaatggtatgactctaaaaaaagttttaaaagattaaaattctcaaggcttcgtcacggacccccacgcctgaagtataccaaggcaggagactcacaattcatcatcagcatcttcaggcaagcaaaacaaaacgccgaggtgtgtgtcttccagggattcggtgtcgtcgacatcttcgcataaagtatcgagtctcttcccttctgtgacccatttggagaatttttccttaacctcttttgggtcactgcaaacgatgccagttttggaaattatttcagccaatatttctagcccattggcacggacgtagttaagacataacctgtccttaagccggtagtataacactttgatcaagcgagagcgtacgatatctttctccgttctctgctccaggttcttgacgtagatgtagagttgggccacaggtgatctacttaaatcgaggtcaatactgctttccgtgaagaatgataacgggttatcctgccatcgatccacactagccagaaaatcgggaggggcgtttatttttaaagtattgatgagttcgttcgattttcttgagatcttgaagctttcttgagatcttgaagcttttctgagaataacgaccgatttttcttctggatttttttggaatagaagcccaaagtcgtctgaccaagttcataacctagtcttatgttaatttatgttgcctcgttatgtccttgtagaagacgcacctcggggtccaagagcatgtcactgatgtcatcctttccactagactcacaatcccgacaagccttttcgagtttctggctaaaatacttgctctgtgaaagaccccatggtagcaagttggggaactgtacaaaactgttttgctggtttgtggttagaagaaaccaggggtagttgcgtcgaatctttcctcccggaggtcacatgctgtctgacccttgtttcttgagcggattggtcgatctacaaatacggctgtaagcactgcctgcatgccacacagccaatcgcttttgggccagggtagcggcactagcctgatgccatccaggcaaaggtcaaccacgataaaggcgataaaagcgcattcaagttagaataatgtggttctaatctaccataaacacgctttggtggatttggtggggttgcgcataaatgcgcaacccccattaggcaattttcacagcccacataagggttagtgtcgatatctgttagaaaaccaagagaaccactcctgcaagtattctgccaagcagtgtaggggtcaaatatgtgccgatacagctgaacgtggcgtccaaacttgtacgttgttgattggccctccgctttcaaagttggccttcctagcgtttcttttgtggctggccactgacttgtgatgtgacaggtctgcataaagaggtttagctaggaagattctctcatgtttataaacactagtccctcagctgctgtggtggatctttcccttcaacctctctacttagtgaccacttgaactagccaacatctcgtcaattctattccaccttatactgttaagatacagtctgataaaatatgtcgactatcaacatggtgaaatactacttctaccggggaatgctccctgaaaatcaacagaggctgcgagacttgatagcccttgcctatcagaccgcaagagacagaaaactctaccccaaggccatcctcatcaggtgagaaagaatttcagcacaacgaacaatgatatagagacttgtggcccatgtcattagagacttcgctaatgtcgaccggcaggtccaatgagcactccagtaccagtcaaggaggcatacacaagccggatcccttgggttggcatgtcactctctgtttcaaggacgacgtccagcttgccagcaatacccatgttgcttctcatggctacgtcaagggcaaaggggacttgacttttcttcaagcgactcactcaggggtgaagccagactcccacttgaagtcgagtggaaagccggtatggccttctgaaatggaattagatgttgcaccggagattgggtatggtcactttccaagtgctggtagtggttaggtttggggttaccaatatacttggatcttgaagggtagcaaccggtcgatacaaacccaagtcttgttatgaggattcaccaggggatagtgatagctgctgcctgtaaattcgtgttgcaattggtgctttgtgcggaaaatccaagaatggtagataaagtggctagcaaaacttggcaaaaacaaagacaattacatggatttatataacacattaccgtggaaatctgaatagtgcacaggcgtgcgtattattattattcgtcagcgtgtctgcaaggttgaaattgtcagagatatttactcagtatagcaatagtatagacctacatagaaatgaaacatgtgtatacttgatccgctttcttttgcctcaccagacagagcaagacctacggagtataactagattgagcccgccagcaagcagattagtcagccccagcatcagctcggccaaatcctgaaattgccgaaccctcgggaaagaatttcaatgctccgaccgcatccggacgaattccttttttgctcaaattgaacagccctagaaaaaaagggaaattatcagatggtacgaaaaaggcgtgctcttacggaagaggaagagcaacaaggtcgggagtcccaaagaaggaaatttgttgcgtgcgttttccagatagctcacaccggagcaccgagcactaacacacagcattcacagctgtcaaagatgccactcgcataaaatcaaatgttccggagaccagccgtgtagcaaatgccgcacggtaggcgtcgctgatgaatgtgcctatgctactcgggatcgccaggtgaaagttagtgaaaagtatgcaagcaagccaccgactattattagccaaagccctgaaaagcttgtctattccaagtctcagaccagaagctaaaactgtcctcttcaatcagctatttggatcagatcctcgcagagaatcagcggcttaaggaacggtcgatcacctcggctcaagtcgccgagaccaacgacccctcgcaaaggtagacatctctttgactttccaaaagataacccacaatatacagaatactgaggtttacaacagaggccctgccaagacagcagatgtccctgatggaacaggcattcagaatccattgattggagatcgagcctggtttcaccggtatgatccctcttcgccgcccatctacatcggcgaggcagcatgttcagcattcgcgacacggtttcggcgtttcttgtcggggaatagtggaatgccacatattccgcgaacacagtatgagcgcgaagagacaatcgccgcagcgaacgaagccgatatccagtggccgagtcttcaccatgcccggttgttagtccggatagcaatccaccagatcggacatctgtaccacctcatgatgcgcaagtcgactttagataaactggaagaaatctaccagacacaagactttgactgcgcggctaacaagtgtaaattcttcgccttgttcgcctttggccaggcgtattcaatcagatctgagcccaattctggctccagggtaccaggcacatcgtattttgctcggtcaatgggattggtccagatcctgccagagagaaccagtgttacacacctggaaaccctgctactgttggtatgtggctcagcatgtgctattgttcgcatcaaaatacttaccatatcccaagtctcttttctcatactatctcaaccggcgtcattcagcatacatcctgattggaaacgccatgcggatgggtttgaccatcggcttgaatcataatatcccggaatcacagctcatcgacccagtggagcgccaacaccgcatccaaatatggtggacgatctacatcttcgaccggatgtgggggtccaaaatgggtctcccaatgcaaatcctcgatgaagatatccacgtcgacatgccgtcaaccatctctccccgctggcgccacgaggaagaactctccgactcagaatacatgaccgccaacatcaagctggcacgcatagtgggcgagacaatcacccgactatatagccggcgaaagtaccaagaaaccttcctccaacgcgttcagaaactcctcaaagccctgaaacactgggtagaaacactccccgaatccctcagactcaacatggaagacctagaatcgagcaagaaacccatcgtctcactccacatggccttcaaccaatgcgtgatcctaacgacgcgcccaacgctacttcacctcttaatgacactaagcaaaaagaggaaacctcaccccaataccggcaatcgtaccagtggagccgagaccgaaagcgatagcgaagacgtatccgtttcccaaccagtccttaccctaagcgaagcatgtattcatgcagcgcgacactcccactccatgatcctgacaaggtggatcaacgggtccatgccaaccttcggctatttccacgcgcactacctcttctcctcggcattgatcttggcaatgtccagctttgtaccaatcggcagtccgactgatatgaccgcgttcgactccgcgctggatctgctacgctctatggccgagaatgggaatttggcggcggcagaattctatcggaatctcgagcaggtgaaggtttgtttaggtgagtatcagggaggaaggcgagatgacgggaatgctgatatggctgctggtggaggtgtcgctcctaataccaacgctaatgctagtggtaatgctgctccctctggcaatggtgcagtacctttgtctgggccttcgtcggatttagcaacagctactactccttttttgaacgccttgccactgaacccgtccacatcggcaactatacctccggcatctttgatgcccacaacgcacagtatccttgcttctgccccaaccacacaacctgtccataaccatggattcgatgcatattcctatcccttgagggatgccgtcagtgggtacacgaccgaaatggcgtttctagagccgaccatgcaagattttctggcccagtcagatattgaccttgggctgctgcatcctgttgatacgttctttaacgaggctgagaatctgtatacatgccacgagttttgattgggtatatctggggcatatgagataataatatgcacgttttagacctagtcgttctggtctgtgttgacttgacaagtggctcaacactgtatggtcgaagctggtattcaggtcaagatactatcgtgtgtacgcagagagatatccttgcaggcaaaaacagttacggtctctttccctcaccatcaagccggtgtatgaatcaaaaatcccataactacatacatgagatacagaggaatatgcgcgtctagatttcggcatcaacagcaagcccaaagttcgagccatgtcgtgaaagaaggtccatgcagacaagccaggctctccgggaagaaagatctttggtcgacattgctttcaaccagtgagtcgctttgttgatctttttagtgatatcaacagccttggcggtgcctatatgagtgcgagtgaacagctcggtgagcaggatggtagtcgactgcatgatgttgtgcaggatgcaccaccacggagcgacgccatacagccaaatcaagtccggattttcaggcagcagttcgagcatttggcctgccatatgaacgcacaaggctgccatctgatcacacaccgttccctggcccgcttcagatgactgtcgggatagacggcggatacagggctgcaagattatcagcttggtcgagtagaattggaaagcaagactagcacgctgctgtagaaattgaggggttgggtctagcgttgtgaaatcaaactccaccggaagacgagacaaccagttgtcagtatgattgtttagcgtggagatggcggcttcgatctcgtgccatgactgtcgaactgctctgggagcatagagcatatcaatagcttctcgtaagagatgagccaagtccactgtgtacaaaaggtacagagaggaatttggtgttagattctctacccccgtctgtctggccctttcttcttgttttcccttgcccgactctcgccgttccggggttcttggagccatatactcttttggcgaagttgccgtggtatcggaaattaaagaggggggaaatgtacttcgagtcctttggtcggtattaagttgcgcgacacgcctgtcccaaaaattctcctctgcgaaggggacagggaggggtgtggagcaaaagatttctcccgtaccaggtggacggcctgtcatctcacatagcaccatgtccaacataaacagtgcccaccaaactcgatatcgaagttccttcgaaaactgggtgatgctatcgctctcgcttcgaatgtttagacccatagtcaccgccgatcgactcgccattccgatgagtttccatgacctagatgagcaagaccaatcagatataaatcatgcaataaatcaagaaggaaaaggggcaagaccgacctattaatttgaccaaccgataggaggtagaaagcagccaagccatccacctgtgcctgttgcaagtccggatgatctagcaatactttacctacattcaacctccaagcccgtgcaaaataagtctgatggccgtcgcaagttggttggatttgatcgacgaagaagcaatgtctggccgcaatggcaaacaccaagtttagcactataatccatcgtctcccaggtcgcacgttcggattcgcatagaaggatcgatattgattcagaaagacggcctttccaatgatggggaaggtaggatgtacggcgtgaaagtaggtgtcaatgagcctgttagcgattggttgcggaggccggtgtgcgaggtcgatatcgtcaggaactagaatttccgagtcatcttggaagtagttcacggaagataacgaagggcgtgcgggggtatctttgactgcaatcaagctgccatgatcaagaaagcgcttgagtctatacaaccatgccatctctgaatgttcacccacaaatcccgtcggttgtactttctcatcccgatcgaagtcctcttcggtgtagtctacagcccccgaggaaatagacacatgactagcatcagcacgggagtgaagccctgattgattgatgggccttgttgggttggtgaataaggtagggataggggtagtgagcgtggtccgtgaatttagctccctcagtgttttctcgacccgctgggccgacaagacatcgagcttgggataaagttcgcggagcaaagcatcgaaggtttgaacccgtgtagttagatcgttcagctgcctatcacatgtcagatgaaagtattagaacagacgaaaaaggttaacgacttcaccatcttctctcttttccggtcgccatacgaacacgggacaccggcatccaggcaacgatgacaggctgggcgatgaccactacatttggccttttgctcgcggcaattttcacaagcccggctgactcgaccactgctagtccaactactggattgtgcgttccgggggatagccaccttagcattcacgcggtcgcttgtgttgaatgaaggataatcgcgggcatcacggatagtttcggtattgagctccaggggggaaggttgcgggcattcaggcgcccagtcaaaattgaatccatttcccaggttcggatattcagaaaacggagcaccaaagttctcacccatatcgttactagatatagttttcgaaaggatttgatcataggaaagggttttcgcacgagacgcaagacgctagcgggacatcgactcataagccacactggacgaaccgccggggaagaagaatcatcccccttgcacacgaaggaaaaaattaaaaatagaaacacacaaaagcaaagtcgacgagtcccctactgtggactagtcacaagtgggtttcaaccgagatcgggtcctctggtatgctggaggtctttgccgccactaagagcagcgctaaggccaataagtgctttgcattgcactttggatggtatttttttgaatagacgagaatgaacatcatagaagcttccagactgtgaatatagatgtgttgtatcgcatagacaatggcgcgggtggtctgtacgagccttgctcgaggttttccttcggtttgtagcatccatgattcccatacatataacataaagttatatggaacccgctctctgacaggctgagaagtgatgttctctctgtactagggttcagacccaaatcttatcgccctctttcggtccgagaatcaccggtatcccaaattccgatgatagtttggcaaaccatcattgtgtcaggacccagcatcatgaatacatttcatttggtttgcttatcagaatcagatactgcacggtaagattgctgcttcagtttcctctcccttcaagggtcttggcaaaatttgcacggggatctttgttgtgctttcagacccggaaatacggaatcgtatgacagagtcctttctaggtcaacatccaatgcgtttctttcaaccacatcgtcttgtttctcttcggacttgcctcagtttgggtgggtcgatattcgttcgtcatcaaatcgaagacccactgacgttcgcatgctcatgcttaccgaaaggcaagcagacaacaaaccatcacgatcccgttgatagaagtgactatcatttgatttcctggtcttgtaatgactcgccgaagcgtggttgattgcacgatcagctgcgatgaatagtccgccagctagatggtccggcagtccggcagtcggcagtccggcagtcggcagcaccgcagcaaatagagcaatccaaacgcctaatagaccttcgaaggaagatcacagatgaaactgatcattttcatcatcaactatgaaaaatttagcggcaaaattttgacgcggacccaaagggaccggacctctgtacagctgggcaacgcgcaccagagtcttcgctcaaccctagtcttttgctggctccactgctcgaatttctaataatgcgctataggcagcattttaagcacagcctgtgatctgcaaggcgtgagaaccagaagtctgcaatgagcacttaaaggcaagacagaggacaaaatgtgaacgaaagcctcggtctttgctttatctcataatgtaagtccgagaagaagcgccacgatagtgatatgaccggtgatatgagctgtgatatgaagatgctcatacttcactggaagctgagctaaaagctggttgatgcgaggatagggatggacttcggagcaacgcgcccgttgctcttggtttttctgttagtgcacgcgcaaatccattgagccaccattcagtgtcattttcccaggaaaacatcaaagattaagcgacaaagctcccttcaagctccgctctgtgttagaggtagcgaagatatgttgttcgtgtgttggaggtgccggacaagactcggggacaatccggaaaccaactccgaataacgtcgaaccaattatggccaaagagatcgacattgtaaagcttctccgcccctatgagctcaggcaaaatccatctccgactcaagcctatcaatagcgcaacgcacaatgcagcgggaaatcgagccacgtgttggaaccgttcaaggggaccacgacccaagcgcaccccaaatcacaagacaatcgctttctattcctctttgacgtcaatgaagagtcatgtcaaagaaaaaaaatgagattgggtggcttaattttgggctcttgggtcaagcgtcaagtcgggcgttccgccgctacgggttcatgtgaccattgttgtgattgttgtgaatctagtccaccgagagataatcaagccgtctcggcgcgagctacggacgacaaaaaagtgtttcaatgatgcctgcctgttgtgtccggagaacatgcgccagcctatcggctggcacaggtcgtgcatacatgttttcttttcttgcaggctgactctataaatctgccgtttagggttcggaactagtttctcaccagaattcaattattttcgttgtttttcttttcgttggctttcgggtagcaaataattcattatctatcaagtcaattgattcaatccgtatgatgaccggaaatcagcgactgctattgtatgattacgccatagatcgatgtttatagtttgcctcaggcgaaattatcatgtgaccagaataattcacgtgaccgtggtatctcccctctgcaaaaggctatctcttgcaagaactcatggacgcattctggaagctaaattaactaattacagcgaaatgcaagcataacataatacagaaatgtctttgcgcgggcccatgcggcggtcgcacctgaggcaagtgagcgcggcgagcttggaaagcagctccacccactcactggaggcttcgaaccgtgaccatgaccacgaccaagccatagatgatcggactgtcaggctttcatcggcaagctggacgcgacaccaatgtgcgctttgggtgcacgatgagacgttttcgcgtgaagagattttgttgaatccatcggctttcggcgaaactgaagtgcaagttggcgatctcgtcgagatcctacccatacggggctctggcgataatggttattctacacttaagccagaggcagcttcgaaagctgctcgtgagggtcatgccgaactcaactcggcggctcaaacggacagcacctcgaagttcaagactccactgcagagccgttgtttattcgtcgtgaaggccttaccgccagaaaccaaggctcggaatcctcaattggagatctcagtgaccaacaatattgccaacatctttggtttcaagaatagaactcaagttacattggcgattgtggatcgagaccaatgtgcagcgtctcatgtcgatattgcctttcgcgatcaatacatggtccgatcggacatgtggagactagtcatgtcggagttatcagataaaatcatgtataaaggacaaaagatcatgtttatgggaagcatcaaagccactgtcaagaacatctttatccgagagaagaaatgcctttcgggatatttttcgccacatacaatccctattttccgaagcgagtccgccaaatatgtcctattcatccaaatgtcgaaagaaatgtgggactttgactcggagggcactggggacatcctcttcagtcgggttatcaatggtttcctaccggagctcttcaagcgatgggctaattcggacgccaaacatttggtaactattgtgctattcactcgagtcgaatatgataaacccaacactccaggtcagcctaaactcagcgctggaaacttgaacagcaaatttggaccaaacaaagttccaactcgagatttctaccgtgtggtagtaaatgatatggcaagcggccattggacgaccatcctagacgagctgaaaagggaattcaggaccttcttacgagatgtgtcaattctaaaaccggacgacgttgatcctgtatctggtatcaagaactccaagccaaacatggcgaccattgccggacacccaagttcagctctacgaggaaatattttagaggccattcatctcgcttctgctcatctggcttttgatcatatcgatcgcgacatggtccatactggcacctcgatcattgttatcacacccggtagtggcgtttttgaggtctcctacgagtccttggcttctacaacagaagcccttgcgaaccgaggcatagcaattgacttagtctgtttgagtccgatgcctctccattctgtgccacttttcaaataccgggagccagtggagcaaccttctggggattcagggggagctagatccagtgaagtgaacagggataggatgtcttctgagatacaccattccctttcaagcgttgtcagcagaacgtcatatctttctccaagttcatacctgtctgcaactagaatgagggagcgggcaacacctcaagccaaggaatggagctttggcatccctcattggcttgatatctcctattggaaccctgaaacgtaccgagagtcccggcgaatcttgaaaaaagacccaaatgcgccaatctctcttaccgtcactcgtccatcaaaggcattcacgccacgagtgcgtatgtatgagatccaaatgatgggagttatggaaagcgaacaagcaaacatcacaatcccctaccttactgaagggcgcggtggaacaagacctcgtggatcttggcccggctacaattcaggtagtcgcgctccccctaaaacacgtttcacgaacccttcatctttcaagggacaaggacaacttagtgatagccttcgccgggggtcctttgttcaaaacgtggcagaccaaaatgaatcgcagactcgagatacgcggagttcacgaaaggcagtgatgtcttggatggatcaatacgatgaaacccttttctctgtctctccaaatccgcaccagggtactaaagcgcccaaggcaaagcgacccagtgaagcggaagtccaggctgctgggggtggagtgcatgaacggttatctgcccgttctatcacccgccttcgccatcatgaaacgaatccagcagacgagaatgattctttgcactctggtcctcgaagaattgagtcgaatatgactacaccaaaaagcccaggatcggtcaagagtatgtctcccataaaaccagtgttgaaaaagacgccggtgccaatggcatcacgtatttctcggacaattagcttcgcacttcgaggcttgagcgctactcctccgagggccttggcaagcacagtggtaaatgtagaacatgccagtgctatgccgatgacaaaccaaagaactcctgccggatcaatttccgataccaggagcatcacttctttgagtccgtcagaaactgcatcgactacatcggtctttgaggtatttccgacgccttcaacacccgccaagtcgtcccaaactcccgctaagccgatttccatcaaaatgcctcccaaaaatccaccaaaggaatccgaacggccagaggatgcgggcccccatggatcgctgtcgatggacacgccagcgaatgaagtcggtcggggccatggcgatcctccgaacgatcacaatatcgagatcactctcagccatagtccgcgcgagctacatgcgcggagctccccgagcaaagctttagccccgtgggtccgatcggtcaacccatgcaatacccctaaagatgtgctgcgagatattagttggtttggtcgttggcaacatgcgtatcctcggcccccacatgtggctgtggtgaagtggaagagtttgaagtctcctgcggtgcttccattgacaactgaagaatttccgacagctagcgtgcttgcttcagactatctacagacaccatatcgtgtcttcccaaatgaagattccgaaggcattgaagcaccaaagacacgcggggtacttttacgagaaatgatctcgctgcggctttctcatggcttccaactcattgttggaaaacatgtggctgaagtttctgcgcagcccacccttgaatcattaaacgtcttcgatttccgaggtctagagcgcgatgggctcacagtgtttctctccaaaggcaacgcgattcaccgacttgtctgcctccaagggggagaagttgaagtgacccgctttacgcatcaaaactctgcggtgatcatttctcccaaaaagcctacctttactctttatcaaccggcgatgaaaacaatattaagcgcggaatacgaagtgaaggacatcaagctggatccaacctccgaagagtacaactggaactatgccgataattatgtggctggtcatcgagattatctccaaaatccagcgcagcagctgcaattctggcgagtccgttacgtcttgattccgcttcaactccatgccaattctcggcggaatttgcaaacttctcatgaggataacgaagaagaaattcatttgctgggtatcagccaactgacccatatttggcaacgattcaaatacgtgtcgccggaggaaaagcttttcgagacgtcaaatcccaagcgagaccagaatcccttgaatatcatgtaccaaacacgcaatccatcggaaatcgttacggcagagctggatcgtttgctactcactgatccagggctcgacaatgccccggctcagctcttgccggagtcggaactgttggacagatctagcattaatcttatgtcattggcgcaaattatccaaggcgaaaagggcgtccggatgatggaccgacggtggcattggaggttacattataattgtttcattggatttgaattcacaacctggctgttgcaaaacatacgtgatatcgatactcgtgaacaggcagttaaattcggcaacgagttgatcgatcatggcttgttccaacatgtggagaagagacacaatttccgagatggcaactatttctaccaagtctgtgctgattatcgtgtcactcgtccagagtctcgaggaagctggttccctcaacttaggacagacaaatcgatgccgtcgacacccgctatcgggactgtcaaggactctcctgccagcctcaaagctcgatcagacagcatcgacgagcgcataccacagactcctagcactcccaccaaggcgaagaataaggtcgccatcatgttgtccaagtccatgaaattcgatgttgatccgcgcaagcggtcgaatcggccggaagtgattgatcttcattgggaccgactacataaccccgagaattgcttccatatcgaactcagctggatgagcacgacccccaagttgattgaagataccgtgctttcttgggcttcgaccgcagacaaattcgggctgaaattggtacaggtgccgatcgccgaagcctgtgctatcgacaagacgcagccattccggaaaccctacaaggtcacactcaagatcccaccacccaaagggccattgcacactgtgttcaacaatgcgtcatttgcgcagccgggtccaccggatcgcctctactatcagaaggccatattgcgaaagtttgatttcgtacttgacttcgaagcctcctctgcattcccagcagacgttgaagtctcttactcctggggaaagcccgactacaagtacccgcagttcatccaccgaaccggaagcatcctcgcgcagatcaccgacgaaggtgagttccttgtccttgcgaatcggctggtgagcacccgcagcaccgcgagtcgagacgcagcccgctttgaaaaccacaatcggtccgacttccgaggccgtgatggacttgaccgcatctcgccccgactttctccaataacccggcccgttcatgacattggaagcatcggcagcccacttaccccagctggatcagcaagcctcgacgcgggaaacttgtaccgcgctccggaacacattcttaatggcctatctgagttctgcaacgatgcagcccaactagagcagttctactcggagtcgcatgctcgtccgttatccacgaaggtggaatcgactaccgcaaacctaatggatgcatcgatcccgtccctcgagcttcctgccagcgtagtcagtcatcatatcccactgccgccaggattaccatctcggatcacccgtgattcgcgcgacggactgatatcaccggaaattacacttgccagggctcgggcagaaagcatcagctacaatcccagccctaggagtggcagcttacgacccttgatctgaccattcgacgatacccatttgatgctctgatgattttgtacccaaatgaaatgcgatattagtaacaaaagttaccgtgaaaagaatttgattttattcgactctccacgtatcccgtacagattttacatattctgatctcgatttaagaggcgaatccaaaaatatccagcctctcgataaaattcctcatcaacgctaggccaagccaccatgcattttagcctgatatcagccattcagccgatgttcaaaccgcaccaatccaacggtgtctcccaccccgaggatttgcccccgccttatgtgctaccccgagctccagagaatagcggagctctctggcaaatgcgttattcagaatcaggccatcgcggacgatacgccgtgtcaaatggagcaggtctaccttcctcatggcgtaccggcgtaaaacaaaaagagcttggctgcccttcctgtcgttcactttcttcttttgtctttataagcatccaaagctgaaacgtagccatcagtatctggggtagcttgtgcacgaatttcaggaagaaggatatcaattggccttttctctcaagatgaagttcacctcggggatgtggtgtctgcaggtaattttcctcgcttctggttactgaatttggcatggaatgaacactgacacgcaatcggctggcataggatggcgtgaatattgagtggatgagcaacgtggaaagattttcagttgaacacgactcggtcaacctgctgttgaacaagttccaggcacaccgaggaaataccctcaattcgcgtgcgttttcaatcttcccttggtataggactccagaagctaaacgaaaatctatagccaccatctccgcacgggttacctcaccactggagggtgtcatcggcgtgaagcttgtccattggtaagtacctcaagggctcaaaccagagctctcggtctcggtgcttgttttggcaacgactaacagcatacagggctggccaaaacgacaacaatcctcactaccacctaaacaaaaccaccggacacaccaagatccagcacgacgatgctaaaaagaaactcaactacacaagcgggtcactcaatttggctgtgagcacctccgccaatgatctagccttggaattccaatctccagccagtaagaaactgacaggccaatcaccccgctctatcggatacgttcgcgaccagcgcactgagaagcatcgctatgatgacggcatatacgccgagcgccagggatatatgctcgcagggcttgacctcggcgttggcgagaaaatctacggtcttggagaacggttcggccctctggctaagaacggacagacggtcgatatctggaatgaggatggcggtacctcgtccgagttggcctacaagaatatccccctctatatcagctctaaaggatatggtgttttcatcaatcatccaggcaaggttagtctggaggtgcagtctgagcgcactactcgggtcaatatctctgtccctggcgaggagattgagtactttgtggtgtatggcgctacaccaaaggacattctgaatcggtatactgctttgactggcaggccggctttggttccgtcgtggagctacaacctctggcttactacgagtgagttcgggatattcatttgttctggaaatctggagaaataagctgacattgttatacaggcttcacgaccaactatgacgaagagaccgtcactagattccttgatgggttccgtgaccgcgacatcccactaggcgtcttccatttcgattgcttctggatgaaatcctatcagtggtgcgacttcgactttgactcggagatgttcccggatgcgttggggtatctcaagcgcctcaaggagcgcggtctccgcatcagtgtctggatcaacccgtacatcgcccaggcatcgccactatttgaagtaggcaagaaaaacggatacttcatcaaggtatgttccaagacactagcacacaagaaaaatgatatcgaagaaacaaccactaacaactcacagcgcatcgatggctcagtatggcaatgggacatgtggcaagccggcatggccgtcgtggacttcacgaatcccgccgccagcaagtggtacaactcgcacctggagcgactagtggagatgggcgtcgacagcttcaagaccgactttgccgagcgcatcccagtcaagggcgtccaataccacaacggcgctgatcccgaccgcatgcacaactactacgctctactctacaacaagaccgtgtacgagacactcagcgagcgggtgggccacaaccagggtctcctattcgcgcgcagtaccgcaccaggcggacaggcgtacccggttcactggggcggcgactgcgagagcacattcgaggctatggctgagtcactgcgcggtggactgagcctgatgctgtctggctatatcttctgggcgtctgatatcggtggatttgagggtacgccgccaccggcactgtacaaacggtgggtgcagtttggtctactgtcgacgcactcgcgtttgcatgggtcgtcttcgttccgtgtgccgtggatatatggagaggattgctcggatgtgctgcgggattgcgttaagcgcaagatcttgcttactccgtatattctgcaggaggcactgaagggccatggaaacggcacgccgcttatgaggccgcttttcttggagttcccagaggaccttaacacgtatgctgttgatacgcagtatatgttcgggccgaatttgctggttgcacccgtgtttacagaggagggagaggtaactttctatgtgcctctgtctcctgatgatgaggctgggaaatggatctcgtggtttgatcattccaagtcttatgagtctggtcgttggtatacggagactcatgactttgataccatgcccattttaatccgccccgggtctgttacggttaccaatccaacgatcaaggcccctgaggatgatgccttagagggaattgagttgctggtcaatgggcacctgcgtgttgagactacagtcgaaattatcaactcagcccagtcaggcgagatcttgaagactgtccgggtctctcctactgcggatggaaaggctgaagcaagtggtcacagtgtgaaattggtttatgtcgcgtagatacgtatcaaatagagaatgaaaatcatggaacgtatgtcatttgcatcaaattggtcaagagtcatattagaaaggtaggggaatagctcccacaagcggaactaaacctcagtatgaagtgtgtgggtatcatattcaaacaagtcgcaatgcaagatgcaaagtcgaaaaacaaaagaaaaagcaaagaagagaaacgtattcaaaagctcgaagcctaggtctggtaccatatcgggcaagaccaaatcactaaatgctggcaggcgaaagaaaaagaacaatgcataagtgcaataggcatggatatgcaattagtaaacgtaaaaagcttggtaaagcagaatcaccaaacttcttcaacgtcaaggagccactttcggattccttcacgcaacgtattatcagcacctgatagtgctcttctccgctcgcggtcggccagcccgtgcgtgctgtccacatcttcacggcagtgttcggcggtgacaaggcggacgacttcttcgagggccccgagcaccatcttgcggcattcaccacggggcacttcaaggggaggggcttcatcgcctctgggagacggacccttatcttcagctttacgagcgcggttaggggaaggggcacgcgactgttccattgacgaataaccgctctgccccaagacacgctcgacagcatcaactagaactccgtcgagatccatcacaggctcctcgatgaaccgctcttccacaaaggtctggtcccgctcatcagtgacggggccgtggttaggtttatcatgtccagaaaagaagctggtgaattgtgaggctgatgtacccccacggggggcagcgctggcaggcgaagaaggagtatgaggagtcccagagctgtgacccactattatcttacgtcgcaagcggagtcgtttcaccgtagaagccttagtgtctgcaatcaaagtcgtcgcaacatctacccatctcccattcatatccgcatcggatgtgaatgggatgtatggggatggttcagcccgcattgcctgtttgatttctgcttcaagagtagcgtaaggccggaccgcctggagcgagaaatcctcatggaaattcttcaaccaaccagccacatgggcagtcggtccatcgctgtccttcatagtaccggggaacccggagccactgctgtgcgtagaagcaactgcatccatgctggtgacggaggttcgagtcttctttggcgaggcaatcgttgaatcaccggacgaagaaagtgacatgaaaccaggaagtggaaggtcaacatccaccacgccttcctctgctcggactgacaacttcaaaggcgactcccgaacttggctggtgagtgatgatggctctggcgaggcagtctcggttttgtggggagcagcgacagatgcagttggaattgagatgtttccactaggcgctgtttcgggccggtgcccatcctcattttctgtgacttccttgaccatttgagtcaaagtggttgatccgcgtctagcaggaccagatattgtagagacagacccttttcgagcttcggatggggatggggaatatggctcgctacttccggtagatgagccttgacgggagctccaaagaccggagaaaataccaccccagcggcctccagccgaggaaatactgccgtttgtgctcgctgtagagctgtcacaccgttggaggctctttagcagggtctctgatgctaggctctcgttgccttcggctgcactgcggtccgctctagcctgacttgaatggcttggctgagaagtaaaatggggaacaggaacagtactgctctgggtgatcatagaagtagttgcttcgctcgtattcatggcccgagcatccttccggtgcatatttgcacccgggggtttgatagagcgagcatcagaccctctgcgggccgaggctgagttttccgccgttggagttatttcagatccatctaacgaccgctgagctgtctcctgagacgaaacgctcactgaccgctggtggtaatcattatcgcccatgatcattcgctgagcacgagctcgtctatcgatcgctctccggagagactcctggcggaggataggtacagtcggcgggctttgagagatagcacgcagggagggcgatgtgccaggcctgataggggaaggcaatggctccagccgttgtttggagggcaagaaggcggctagtaggaacacgagacgacgagcagtcatcttatctgggcatataatgactgttctgtttgcaagaatgagttcgccatcctgctgagctttgtgctgctggttgtggcggcgacggtaccactccgggccaaggctgttgagccactcggtgtgattgcccaaaaatgctgtcaaaaccactaagaagaagaagttctgctctttgtcgcccaggccacggacaattgaacggccttcctcccgccagacgccccagcgactttgtccagtgaccacatatggggtttgaagagcgagggcgatccggcgagagctgcgaatagcttcttctttgagcttcgaattgaccgatagaatgttagcaggtaaatgcacaatggtctggttggtccgctgcatattgggatgcttcgcaggctttgggtgtggcccggatagagagtccaccttcttcaaaagaaagagaatttcgttgcgaacaagtctttcgagatgggagagtgtacgagtgatgacgtcccaatgatcaactaataagtccagacgctcgtccagactagctgggggagaggcagaagatagactatcgtcaaagaatgcaccaggccagcggtgatcggagtccagcgagcttgaaaaccgtggccgaggagaatctgggcctggagtactaaatcttgagacaggacgtccattgttgcgtggcagcaaggggatctggatcgtaattgcaaccgcgtacattggtgttttcttctccttgatcttcttgcgcttagaaacatccgggaatgggaactccatctcgggcaatgactcttggtaaagagcattggcgtagtcatgtcgttcggccgacgcctccgctccttcgggaagattcacactgaacatgcgagtcaagagaaccgtgactttggaaggtggcttgtcgtccactcctcgggctcctatcggagccgagggattccctgcggtataggcccgggaaagtggactgccggtggcggatgctgcactcaccccggttgccgggctttcatcagcggaaattatgtgcattttggtagacgacccccgatagctgaaggcgctgctgccgaagatgcagttcaaaaggccggtatcattagagtcggaggagtgtcgcgatgagccaggatcatgccatgtccccggtggtgccaatgtagagctacggcctcgagcacgggaaaaggcacctggaccgcccggtgacgaccggcgtgcctctgcagctgcggagaggggactcgagtcgaggagggaggattgaggattgcgacgagttccacgagaaagacttgaggctgctcgagtatgtctaagacccgcctggtcgttgccttgtgggtcgattccaagaccggcgggagaagaatcggacgcacgagtgtcaagtaagacacatgcatctcggtcgcccaaagcattttgtgcgacaatcacacggaaatctttgattgcatccaattccattcccccacgatcatcatatgcaccagcagtcgaggcattcggagaattgaaagtcgtctgcaatgggaaggcatgggtatgagaacgtcgaaggaggctggcgtcggggaaaagaagaccggaggtatgttcctcttcggtcacagactcaagaggcgttccattgcttcgtccagagtatgtcaccgggttcagagtcgacacagcgctactcaagagtcggccaatcatgatgaatgagaacggggaaacccgcagagtgaacaagtacttagttgtagggatagaaaacgggccggtcgaattcacgtagtgtaacggtgggtatcaggcagctagggtatctaggctgcatcaacccatagcttaattcaacgaagcaagaatcatcatcgaactatgagaggaattgagaagatccagagttatgggaggggagtggaagtggaaggtgggatgaggtgcagcagtggggcttggatcagcaattatgaggtagaaattggctttgcacccatgaggactccacagtctaagcaggatcgtgtggaaggcaggaggttcaatgaaataatcccagagcttctctaagggacccagttgctggaatagagaatccagcagagcaaccaccggggagcggaaacgcgaaagggcggtgaagcaagtcacatgatatcagcctcatcacttacggtgaccgatagtgaacattttggcagatgtcttttttctcatataacatcgatttgattctgactctgatagatgccctcctagaaacaaacccgatgtacgacagttagcagtataagaagagcctattttgatcaggtattaccggctattgggactacatccaacggtacccataccaaccactaatactagccaccatgtcgctataaactaccgtcatcgtgtcaccgtatagtcgggtttacaaggaatcgtgttactcggaggcgctgatttgtgtgatttccaacgcatatgaatttgggattggagggaaatgcttcatcttccaaatactactcatgatcgacacatgccacctctacaccgtcactcatacctcgtgtgatacaagcatcatgcctgcaaccccgaatgccacacctcttgacatgctgtaatcatcatgtttttttttttttttcaattccccgacgtgttcgccgttccatccacgtgtttctgcgcttcagccggttctttttcgtttttccgttttcgtcccctgtagtaaattgacacgaggcgtcacattgactgtcagctattccatacagcatgttactatgttgtagcatcttatttgatattttcaatctacatgtgtaaaagaattcatagctgaaagttcaatttcgtttattgaactcggtgtattaacttccaaatcatttcagttctattatactctcagtgagaacgcttgacttttgcgaccaatcgcttcaactcctcggaactagactccttggaggacttcttctgcttcttcttgctatccaggttctctgttggagcctcagcctcggcatcatcaccggtacgtcggcgcttgcggccctcgtccaacagggccttcatgccagaagtagacttgaaccgaggattggtaggatcaatggcgaaatcatgagtgtcgtacagacgtgagaaacggggatcgctgacattgacttcaaagtcatctgtctgggcaagttccaccttcttgcccttcttgcccttgcccttcttccgggcctgtttctcggccttttcaatctcgttcatgtcgaagtgtttgatgttgatctttttgtcatctaccatcagcagctccaactcagctcgttgggcagctgacgcggcttcctcggcagcacgctcctcacgcttcttgcgcctctcctccttgcgtcgagaacctgctgtggcctttccatcggggtcatcaaagaagggatcattgaatcccatttcttcttcctcttgctgtggcacctcggctgggcccatcttggctggatcagcttcattgtcttcactgtccgcggcagcgccatcctctgtagatgacttggccttgagtttctcctttcggcgctttttgcgctcacgctccttccgcacatacttgtcaattgtgctttcttcgatctccggttcattttcgaagatagtatccttgccatggccgccagccaagcccgatgtgaaagtaacctccatctcgccaacggggcgttcagctctggtgcgggtaggctcgacgctcagacccagtaacgcacgcatgcgctgtctctcggcctctttcttggatagctttgtggttgtagcttctcctgcagtattatcgacaacttcgacgcctccgtcctcgtcatccgattcttcgttctcggaactatcgctaccgaggtaggctttcaggtcattctcgtcaatgtcctgacgtgagccccggaaggcacgtgcctgggcttcttttcttgttttgtcatccgcatcccatgtcaatttgaccttgctgtgctgcaaagcatccgttacaaactcagtaggcttgtagccgtcggggatccgagaacactcgtcccgggacttgtcgtcggagaagtcagtgtcctcaggcacgaagcgaagatcgaagaagttggcactagataaatattcaacaccatccaccagatcgtagacatgctttgcgacgtcttttgatgaaaatttgataatggcgtagtaataccgcagtcggtcgagctgataccgccgtagctgtgtagagttgaattcttcaccatcgtcagccttcaacatggacttcttaatttcctcctcctcctcatcagagtcaagttcctcctcttcggactcttggctggtgttctttttcttcccagaagcaaaaatctctttcggggggccttcaacctcctccctctccatgcgctcctttccaaattcgctagggtagactgtggcgttcaacactcgccccccagacggaaggaaactggaaaagactgccatcaagtcctcggcacgaatattttcccaatcgaggttgacaacagctatccgatccgtcacttcgccgagtggcacatcggaccgttgctcgtccgggaactcgatcacatcctcgtccgcctcgtcttcttcttcgtcggagctttcttcttcagatgacgaggactcaaagccgccatcacgggcaggatcatatgaagcagcattgacccgtttcaattctttttggacatcttcgtcgtcgtcggcactgtcctcatcttcgtcttcatcttcgtcttcatcttcatccacctggtaaaactgcttcaatttttccttagtgtcgtcttttctaagctttcgtccatagcgatcgacaggagcgttgctggagaaatccttatcgtctagcacatgcgcaaagcgcttatcgagtttgacgtgagtctggcgtttgctgggaagacggtagcgaggatcggtctggatgttcgcaaatcgaggatccgctacagagacacaaagagtcagtaatcatggtcatgaggtttcctgaaaacaaagtcttaagcttccgctggacgtactgattgctggaccggcttcgcctttggacttgccagccttggactttttcttgtctgagcctgccattgtgagcgctaggaaatttcactttgcataccacgagcagcaagaaaattcttttaatgcttgagtatcaatagatatcgtcggattcagcaagtgaaaatagtcgagaccaataaattatttcttttttttctgccgtcgaagtcagggcggtcaggcacgtgtattctcaaaatggcaagtcttcttttgactttcccatgcagaacaacttgacaacataaattgtaatagtatctacttgaacttgagtaaatctgcaactttttttataaatatgcttttgctaagtgacaatcctaacaacccaatgcttggtctctaagataaatcataaggggtggatcaacatatatacttgaagacgcaacaaatgaatgaatatttcagcatccgaagtatcgcttctctatccagcgcggttctccttcttcttcgatacgtccaacaatcacattgatcctagggtatacggcagtgagcctcttaaggccccgttcacctgctgcacaagttacgaaaacgatcctcccttgttccaccccatgatcaatcaagacgcgaacagccataagtgcagcacctccacttgacatctgagagtcaattagtatgacagttgtatgctcttcgatacgagacggaagtttcaagtaatgcaactccggctcctcgttgctctcgttcgtttgaatgagcaaacgaccagtgagacagtcgggaatggatcgcttaagcgcggtctccatgcaagagcctccacgtaagatagccacggctgatacgatacccttggggtgcaaaccgaggtacgtgctcccttgtggtgtttccacatttgcggatacatacgatgtcatatccagggccctgcaacagtggtgtcagtaaagcaactagaaggcgctatgctcacaggactcaagttcttctgtgggcgtatcgttgggaattgggagcatgaaggagcgcagtacctttcaatcaagatcgaaaccagtcgatcaaagtaaaatatgaaatcctcttgctgggtttctggggtctgcagaatagtattcatgccaataatctgcggtgtcgagggcaagacgtgtacatttgaaggcagctccacttctgctgcaaccaaacctagtttgcgaagcgcttcggtatggttatcagatttctcctgcagcttgcgttgaatgtgtttgaccaccatgtctgaattagttagtgtataggtctcaaaacgagcagctccaggggttgcacaccaatagcggtcttgttctcaatgccacgcgggataatgatgtctaggattcaaaattaacaatggtatcccaatgctttgtaaagtcatatggctaccaacctgagatagagcgttgaggctccacaaaacgagtgtaagaaggcttcacaaattcaaaccattgtttgatgattccttcaatatcccgccctcgctcacggacgtcacgcaagactatacattgtcagctgggttcagtagcccggttgagataacttacttctgcgacctaagcacacatccatatctgcttcaacaaagatctgggccatcaaattagcacggataagcacaatgatagcacagaaactataataccttcacatccaacatctcgacaattctgggatcatggagcgccaaaatcccctcgagaatgatcacatgaggggagtagagggtggtcgtattacgctgccgctggtgctcagcaaatgagtaaattgggatgttcgctttctttctgtgtgatattcagtcaggtcaaatagaaggactctagcaagaacagtaaatttaccctttcttcagatcacggagggtttccaccagattatcaaagtcaatcgattccgggcagtcgaagtcatattcatttgcgtgggccttgtggtgttgctcaggagttaaggtcttgtaaaatgagtcctgtatagaacacattagaacaaggtctcgatttatatgcagttcacaagctgtaccattacaaggatcaccacccacggcaagttcaaagacttgacaatctccattgccacagagctcttaccggagccagagctgccagcaatgccaataatgctcaagtcctgccatggtggagaatatcgcacttcggtggacgaagaaaataaaggcgagattgattccatgtctacgtgtgcgacatacaacgctgtactttgtaggtatcttgaccctctccacccctctggtttcgattatgacagcttgaaactgtccaggtggggagccccgggcccacgataattacctaatctctagtcccagagcgggttagtcgagggccatttcctggaagttccaagattggctgctcacgtgctgcttatgtcagaggtttataatcaccaatttcggcctagcgtgctactttcgcttaagctacttcttccgccgcgagcttttcacttccttttctctttcgcatccaactcccacacagcgatttgtctttccccatggctgtcgtctcttgggttgccttccagctttacggatagcttcagatcagattcaagactggctatctagaccataatgtctgctaatgttgtatgcttctcggcttgacacccgtggttgctggccttttaacacaatgcagatgtctcgcacttcgtcgactgcgacgcctacatggcatcacttcgagcggaagctcgaagaggtcaaaccatctaaaacgtgagtgacctctattccatccccatccgcctacaccaccgtgacatgatgttcttgaaattaagttgggaatctctctgaaaacatgtgaggaaaaacaaatttgacttatccttctgattcacgtcaccactgcacaattttcattaatccgttgaatcaatggttactgacaattacaatgcagcgatatcaactatttggtcatggattacctcatcaccaatggctatcccgctgctgcgaagaaattcgcagtggaggccaacatccagctcagaacggatcttgaagccatccaagagcgggttgaaattcgcactgcgattcactctggtgatatccaggcggccgttgaaaagatcaatgagctgaatcctcaggtaagaaaatttttcccactagtctacttcacatccctcggccccacttcttgctatgattatacggagtttcatgcaccactcttaaattcccttcggggatatttgcagaaaaacaaacatcttcagtcctcagtatgagcaattgccaaatattgaatcttatcagcatatcacgcattttatgtcatgtgccatggctaacaagacttcaatagatcctcgatgaagacccgtctttgcacttctccctcctacgtctccaactggttgagttgatccggacctgcatggacacacctggtagcgatattactcctgctctggattttgcgacggcacaacttgcaccccgcgcccctacaaaccctcaattcttggcagacctcgagcggactcttgcccttcttattttccccagtgataaactggccccatcgcttgcgtcgctcctggaccctgcacttcgtaaagaaatcgcaacccgagtcaacgaggcaattctgcagaaccagggtgctcgtaaagaggcccggctgcgcaatcttgtgaagacccgggcatacgccgagctcaaggcacgagaggccaaaaaagacatcccagataccttggatattggcttggtcggcgattctcacgacaacagtaacagtaatgaccttgctactaacattcgtgacactctgatgtcgaacaacagcgacattgatccaatgatctcctgatccaacttgcctttcaagctggccttgattgtcacttatatccccctattttgtcaaggcaggatctcctcctttttggtccctcttctagcgcggcgtcttggatccacatttctaggtgttgggcgatggtatctcactagctctaataatatgggcgtttcgacgatccctttgtaatacaaatggctatttcaatatttattttgaccacctatttttctcctgaacatggtagttttgtactccgtagcgtaatatcacttgattatatttgaaaagctccctggtggaatggatgcaaacaatgcattgatgtatgcagcaacaaccagtgtagcaagaatgatagctatcccacgcaataaatcaacccacaatatgaatcaagagtggctatgaaatccgataaagcaacaaaagcaagatctaggagagatcttaagcaaccaaaatacccccgggctcgctgcctgccgaatattgaagatgaaatctatcacaaatgtctctagatcaacaacaaatgacaggacacatacgaggcaaaacaggcttccttagaagctcatgagatctggagaatagaaagtattagcaaagcacgaattttgatagagaaataatgagaaagtagaagacatacctcttccaaagagcgctctcttggcccaatccatggccagcatgcatcgcgtgcggaagctgacactctcagcaaagtaaatactacgccaaagatacatagcaatgacgccaccactgaagctcaaaccacccaagtcaaacacagcagcattgctgatgtacgccaggcttccgaggtgcttatacttgaacgccttgtagacagcctcatcgaggtcaccgtagtcgacctcgttggccctgagaccgggaagcgcggcggcaatcttggtcagtttacgacccaggtacacaccctgttgattagcgcgctgagcagtggcgggcagggacgtgagcttggtgtcgatctggtgcaggagctcggaaagctcgccgtagtcaagagtgccagattggtccttgtcgtatagctcaaagagcagatccaggcgacggagatgatttgtggcttgcgggaagcgtctcttaacccgagcggcgaattcggtccattcagagaaagtaaggtgcactttttcggggtcgcggcctttctcccaggcaacggtgcggaggaacctgatgatgttgtctgcaatgttgttctggactgttgagcagtcgccaattgcatagacgtcgcccaggggagcgccaatcacgcggagatgggaatcagtttcgagagcgtgcttgttgttttggccttccagttcattagagagtttttctgagatctcggctcgggctaaagagatgttgttagacctagtatattgagtaatggcgttagtgcactaaccaactccagtggaccacaagcagaatcccattgggatttcttttacaaccgtcttgccctcttccacctgtgagaaaagaacccggtcattacgcacttccctgacacgggcgttggtcaacacctcaatgccatcgcgagtaaatcggctctgcaagacgtcaatatcagacaaattccgagggggatgtagagaaaacatacctcggcatacttagagagtgcttcgtcgtaagtgttcaggatgtgggttcgactttggatgatgtgaacagaaatctcgttccgtacaatgcgagggaaagaatgaagcagatcttcgtttaagagatcgaacagttcggcagcgaattcaacaccggttgggccacctccacacaccacgaaagacagcaggcgtctgcgctcttcatcagatgtggtggggaggcacgctagctccatattttctagaaccctgttcttgattcgacgagcgtcgtcaatcgtcttcaggaagttacagtgctcaaggcctttcacgccgtgtgggtttgttacacagcctagtacatagacatgttaatacatttttgaacatggccctgcttgttctttgtcacaacgtaccgactccgatgaccagcttgtcgtatggaagatagaaattttttgtctgaccatcttggccaacctgggatatttccaccagcttcgcagagaattcgacatcaaccgcagaagccttgaggaagtgaccattgacccggtcgataatgcgccgaacgggctcaaccagcgaccgaagacccaaagttccaaccgtagcagaaggcaacatgggagtaaacaggaagtagttagtaggtgaaacaacagtgacatggtaatcggcagggttcaagttcttaaggagcgcgacgctaccccagcccgttcccaggataaccagacgaggtttatccttctgccgaagcatagcttccgagtcatagtcgccaaccagcacatcggcaatgggcaggttcttcgggcctccgattcgaggattgagagccaattctgagaccgggatgtccgtctcttcggaacctgtgcggtatgtactagcatcgtaaacgaagaaggcgacgaccacggtgccggaggcgacgacgaagaacccgaagaatgtaaacaccttgcgtagagcattaatagtacgggaccctgccaaacgttcgactttagctgcggtttctgatttgaatcggacccgcatcgagaccggcgccaaggctcggcattggggggctgggcgccgatgaggagtgtgtaaggagcgggacagaggtcggcggaatgtagctgatggtctcgaggcaggaatccgccctggtaatgcccctatcgacttcagcgcggcggcgtccgcacgggtccggtgcagcatcgcgttcaacattgtcatgggaggttgtgtagaggatgttcaacgatggaaaaaagagccgaagcagctcatggtccctgtacactcaaaacacgagcgaccttgaagcaatcgaaccaaaaagagtatatctcacaaaaatttatgaggatacgacaccaactatcaccggcgacgtcatcgtaatggatgtcacgtgccaggagctactcgggaacccggcatcaaaactctgaactcatacgacagtgccggactcggttgtagattcaccggcaactatatctagataagtcgatcttctgtgtaccaatggaaatgaatccgtggaattctattatataccaataactaatcggagtggacatcgggccgagctcgaagaaagcctcaaaagcccaagcgcatgtatgataaagagcaacatagcaaccacccattccggtctcggaagttaaaataaaaaaagccattccccgcgggatgcttcatgtgcagagggaaataaataaacgccgacctcgcttgacatgcaaaaaaaaaaaaaaaaaaaaaaaaagatttcccgtgcatgatggatgatggggaaannnnnnnnnnnnnnnnnnnnnnnnnnnnnnnnnnnnnnnnnnnnnnnnnnnnnnnnnnnnnnnnnnnnnnnnnnnnnnnnnnnnnnnnnnnnnnnnnnnnnnnnnnnnnnnnnnnnnnnnnnnnnnnnncccgcccccgcttgacatgaaaaaaaaaaaaaaaaaaaaaaaagatttcccgtgcatgatggatgatgtggataacgcgagctcagtctcaatctaggtcctcgtccggctcagcgctaggcttcttcttaccggttgaactcttccggcccttgagccgcttgctgaggttggagctggagaccgagctcttgcgcttcatgggccgaggagccaccgtctcgtcgagatctccaacagcgtccaggccgtccccttctgcgtcctcgtctccatccaccctgaactcctcatcgatggagagtagggttgcaaactctcgacatttttggtgcatcgtttcctcgttgtctagggctgtcatatttcgggcaacggcttcccagaacttgtcgccggtcacaccgtgcaccttggtggcagttttattgggttccttcgttgcaggtttcccttctttgttcttgctctgggaatttattccgtagagacgacgaaggtaggttcgagcttcccaaagcattgacaatgatgctgcagcagttgccaacaatctcaatgtcgcagggttcgcttgccgcggtgtgattgtcgattgaggcatctcaagcgcaaaccctggcatcatgttatttgaggcatctgcgtctaactgaggtggaccgattggggtgggggatatgtctgtctcaatcgcgtgtgcaataatagtgcccgttgaagaaacgatacgctccatacacgcgatggttggcacaagttcggccaattgaccgtagtcgaaaaatgccaggttttgggagatgaagcgtgccagtagaagatgttctggggggttgccagttacatccaattttttcggatcgaagttgactttggagcaaaggttcgcgaggaactttttctggtaacggctgttgctgattttgacaatttcaaacaacggcgcaagcttcgagacataaggccgaggactggcgccgttggagtcgccaacaatatcacgttggtaatagaacgcctcttgcacagcccgcatgtattctcgctcaaacatggattcatactgttggtggagcattttgtgcgtgtcaaacgcgattttcgcaattgcagggactgtagaagtctccagagagaccagaacgcccgcgcattcctttgggtgcactaagccctgcctattgatactcgcaatgagttcaatagcagtcagtgaatacgtatcctggcgcgattgtgccacctgaagcatgtttgagagaaagttttgggcgatcaaagcagcagcgccatcattgtcgctagccctcaaggaaccacccaatctggtagtgtcttcctgagcggcggcttctgcggttggcatgacggccttttctgacttgccttcatggatagcaaagaagtctgcaaaagatcggagaacgatgttttgcagacttggggcatcttccttgaaaacctgagcgaaagtctgccgtgtgcgttctctgccgaattgaccaggccaagactggcatatagatcccaggctttcgagagccatgaccctcagttcaaagggtgaattcgatgcaatgaagggaataatagagtcaaccattagccccgcaaccgagccaccggtccaggtggggaattcacttttgaaatgagatgcatacttctcaaggtcgcaatgccgtccaacacaacctgcaatgcgaatataactcttagcgcgacccaggattgcagcatgtgtaggcgaggagagatcgacactcttatactgttgcaatggtttcagtactgaaactgtcaatttcaccagtctgttcgtattttgcagaacactgttgatggtccacaagcaagccatgacttcgttcaactccgagcgggagagcttagcaacactcttgaaaaggtcattctgtacttccttgagaagagtgttgtgggacgaggataaaaacggcaagacgcagcgatagataaccacaaccgatcggaataagaaaagatcatctgcggtagaaaggtgtccgatgtaaggatgcagggcctccagctggtccgaggtaaacagcttcgcattcgacttggcaaagacggtgatcgtctgcaaaagagcttgctgggataccttgcttgatccatctgaatcctcaaccagtctctcgaacatggtagcgaccattgccttacaaactttgaagttcaatgccgccgacttggatttatccgaaagaaccgctttcagacagactctaagagactctagggcagtctcactacgctcagtcagaccaatgacgaggcctacctgctctccaagagccattttcagttttggcccttcagacgaggaatcaatggattcgtggaacggaacgagccatatttcttcgaaggtttggcgagccaaacttgccacgctctcctcaagatcgcctgtgcgttgaaggaaactgtcgagaatggccaacttcagttccttccgaggcgttttgtggtaaatgtccttcaaaagtccgatgcagcgtttgcgaacaccagctgtttgatcagctgcacatgctaaaatgcttcgacatccttcttcttccagcttaggctttagaccaatgcattgtccgatcaactgtaacgcggagtcccgaaccataggtgaggcatctgtcgtacaccgatgtataacgcgcaaaacggaaggatctctgtcaagaaggttcgggtctttctcgagcatgtagatgacacttttcaagctgcggctgcgaaccttggccgagtcaccaaggaaagaggccaaaagaactttgagaatggtgtcgaatgctttgccgaaattggaatttaaaaccgtgaggatataggcaaattttccatgcacgttgggaatttggtcgaattctttatgagtctccaaccagcgtggatctgagaaggacattgtcaaaagagtaactaagccatcagtcacctcgtcatgtgcaatttcttcatggttctcggagttgtaatatagggcgcaggctgttttggcccattgagccaagtagtagcctcgcgcgctggtcagttgccaattgtcggaattcttgtcttgcaaaagatgctcgagcgcaatcctatacgggcccgttggagtgatgaggtcctgatgatgcagtgcgccagaagaaaattcctcgaattgttgcttgaggtaatcagtcaattcactgtcggaatcttccagagccgggagcatgtgctgagcggttgctatcagatctgagatagcagaacccatccagccaagaagctcaagcgccatgctcttcgcagtcgcagcgcttttatcttggtcggtgatctgaatcatgcgtaaggccaagatccggagaagcaattctgcagccggccaatcagccgagcccagtacattgatcagatcttgagtgaaaagatccagaatattccgatatggctggtcaccagttttcgtcgagttcatagcacgctgaacgatgaagttcacaatgtattgtgcagagcgcatggcattgtcatagagtcggttggccttgttcgctaggcgttccaatgattcgtctgactcgccatcagactcaccattagcatgatcctcgccattgcccataagctcatcatcgtcgtcatcggcttgtgctttgattcgacgtttgaccttcggtcgcgagggtatctccaacgcagttgtctgaacaagctgcaagactagcgcggtaagtagttggatgttttttccatctgcaactttgaactgccgggcattctgacgtgtggtggggagtttctccagtgagaccagaatctcatctagaatgaacggtcgctgctcagggtatttggaaaacacctttgcaagcacatccatcgcaccacgtctcgcaggctcgtacttctgatatcctaaagcggagtctttgtcattatgcgcattttccacaaatattagctttgcagcaaagaactccgcggccgtgatcgccccctcggagacatcaatgcgagacagaaagtctgcaaaaagagtgagaaccttcttgctctggtgaacaagagtgctaatgatccgtctctgggaggaaaagaattggaagtgctggctgtctttgccaccaggacgagattccactgcgggaataatgcaatggtcaaatacttgattgagaaccgtgggaatggcctcgatgagatcctctggacaaagatctcgctcagtctgacgcccagacatcgtctgcagcagcgttccgattgcaaatagtgcgttcaacacatcctctatcttacccagccactcctgggactcaagctcaccgaatgaatcgcctaggccaatgtccggagattgtgcagcaataattggcttttcgcacaatttttgaatgcggttaagataatcagacggtatgtcctggagtcgatcaaaccctgcaactttccgaagggccttctgcaggcgagtgtgagcatcagatgatagtatcaatccatgaacttctaaagattttgggttcacgaaaattggattcggcgtgtcaggggttgggggaatcgaagtatcgggttcgatttgatcttctgcttcaaaaatctcgtgtagaagatcttgaaacttttgcaaggctgcatctgcttcctctttttggtccttgagtcgtaccgccgccatggcgtcttggtcatgggcttccggtttaggcttccttacgttcgcgtaatcgctgtgttgttgttgtacgggtttgattggaataacgacggacagttgactcgatgtaagaggaggattcagctcaaaagaggccgagaaaggtgccgagttcgatttgttcgcaacgtatgctcgctgattcaatgaagcaactgtcttcggtgtgaggtctttattttcgggctttgtctttgagggtgcttcggggtctgcggccggtcagtgaattgactataaatatatctgtggcatctcagagcttacatctgaatgcaatgtcggtggagttaagcaccatccgtgcgaaggatccaaggctattaagaccggaagtagcaccgtcaggatcgtttgggcgcaactgttgacttcgcgtgggaacgcgaggaagcttgaatttgctatggaatccaaattagttgactgcctttcaaatatttcacatctccttacaattctgtcagctggtctccatccagcaactgttggatatattctcgagacgtttctaaacgactagactcgtcccgtcccgtttgcatttccgtgtcaagtgcacttagtgttttgcggccttcttggaggacatggtttatagacgtggtatttgaaggccggccaacatcgggacgtaggatgcagtctgtgaatacaagctgtcagaaaaatgagcataattgaggagcgaaagaacgaaccaaggccgaagacaggtgcgctggacatagatgagtactgcaatgcttcatccacagatagcgacctttgattctgaaactgcatattggaaccatatggtggcatctgatcatggccgctgatgaccacctgaacggcgggtcgtccattctggtccatggtcgcggttaagttaaaagaagaagtaggcgcgagtcaagttgacatgctcgtgatagagacatggcaatgaaggcaggcgccctatgacatccctagatcattcaagtagtttaaaaaaccagaatctgaaagaaaatgagctgagctacgagcaactgcgttaatgaattccgtatgggtgacggcacccctattgccgtctgtgaccgcctctgtggaggctcgtgcatcaaaaaaaaaagttgcatagattattcactgcataaggcctgtttcgttatcacttcgcttgcaccttgatcttctgcagtatccagatcgtcaaaaatacttctcactcctcaacatgtctgccattggttccttgattttctgcacagattgtggtaatctcctacgagaatctaccggcaatgcagatgcgattctacactgtgatgtctgcggcactcggaataaaggtatgtgactaaaacccgttattcttgccaggttgatagatcaatcattgctaacttctatttacagacacaatcccccaaacaaccgtgtcccagtccaagccctccgcattcccctccgcactgagagccaaactatcggcagtccaggtcctgtcagcagaggatcggaagactgaggctatcatcgaccgtacatgtaacgaatgtggaaggaagcagatgttctacactacggtacaactgcgcagtgccgatgaaggaagtaccgtgttttacagatgtgtctgcggattcaagtatgcccacccgcctcaaaagcatatatctatgcatgcccaacaaatactaactacttcaacagggaaactaccaacaattaaacttggagtaacggattgtacaaaagatgtggggaaagtctatttttggagaaaggctgtataactagcgggacaagagtattaaaatcacgaccgtcacgagacaaactttttttttgcaggatctccatcatgcagcaacaggtgcagcgctatccgggatcagcgcatattgggtttcgccattcttctcaaattctgccatgtcaagagcaacgatgacactgtccctgaccacctgatcaggatcattcaaaaatttcttcaaggtctcctccacaccctcctcctcgcccaggctgccaagggcctccgccgcttcgtgtcgcaccatccctacttccgaaaggtcactcagcgaggctgtgagacttgggatcgaggcagggtggcagagttgtccgaacacaaaagcaacctcatggcggaaaagagcagagggatccttgaggcccttagccagcgcattgacggcgtcgactgccgtaggaagatctggtggcgaggcaaggtcgcgcaggccgaacatcgcacggtacctttggaacagaggaagctttgtgtcaagcagtgtcttttgcaggtcgggtatgcagggttcggcgctggcatctagaggcatgggtggagcagggtcgatagacgtgaaatcactgtaaatcgaagatctcaatgtcagcatttctcttcatggtatataatctcccgcgcagatcgtacctaggcttcaatttctcggccttgcgctcttctgagttctcccacaagattcgatcgacagcaatgtcgcaagtctcccgaataatctctagttcattcgtatcatccctcaatttcttgaggatatccaagctatcggcgtatccaagagcgcccagcgcttcggcagcctcgtggcgacacatcgcatcctcctcggtatctttcaccacatgctgcaggtatgcaacagactcgatgtttttggtttggccgagacagtaggcaagctcatgcttgagtagcgccgagggtgatgcgaaacctgcggcgatcgcttcaatggcggggagggtctggtctgtggtaggctgtaggcaggccaggtgcttaagcgagaaaagagcgcggaagcggcgagcaagcggctcagattcagagaccagcaccttgcggagagtaggaacggtattgtctatttcgaaacccattttgaggagtgtagtcagagggggagtatagaggtggaaaagaaaagttgttaatctttttgatcttatcattttttagagtggggtggcggggcccattcaggcgcatggattttggatttttgctcgtacgttgttgtttttaatgcttccggtgtaagcccaagacataattgttgatagttgcagattagactacctaggtacccttacagctcataatcatgtattagtgtaggtttaagggtggagtatgcgggctctcgcagatgggagcgctgatcttaggagatatactgtatgctataaaaacgttgtatggtgtgcaaatgttccacatgtatacttcagtaggatgcttgagctttaaaacaataaatgaccgagaaaccaaatagatattctcacaccgattgtacacatatcacgagatatatagacgtcccaaacttgtagtcacaactggagtagaaactcggatggattagtttgaagcactatataagtcaatctagcctttatattatatcctttagtatattgtccgtgtgttctctgttcatttagcaggatacttactgtaggctgggatccgaacacggctgttttgataaataccagacagttggagctacaagtattgatcaatagacttgcctagacacctttccaaggaaataagacataaataataaaaaattagcaaagtcatgatcctagagcctcacatgctcatcccattatacaatgctgttgactgggaatttatagcctgagtggaagctctatattatacatcgaggacactatctagttttatactccgatggacctgagatgttggtatcgagatggggttggagatgtcgtgtgatcggtataatgagcataccattagcaaagaggtcgtgatgtcggttagttacattgagacgaacacattgatttgaacctgatatcttacaaaagcgacacgaaaagcgacatgagggatacacatgtgtagacacttcaaaaactatttcacaaagcgcatcaaaaaaaaacaaagtgtcaacacagaagtagaattgacatcgttccctaccttttgctcctggtagttgtaagggagttgaccggtagttggtagccctaactcatgagaccctttatattagaatgtaatatattgaattacttgaaattgaattcgagtggtaaactggcaaatatgtacataatacagcgcgaagtcaaatcatttggtcttgatatgcctgagcttcttgggctcgtgaacgtagttgttggcataggacttgggcacgatacggcgctcgttcggttcctgaacaaagtattcgtatccctgcttctgggcaaaagcgattgcatcttccttcgacttgaacttcaggttggtaccctgcatgccatcggcagacgactgccagcccatgagctggttctcccaacggtaaccccgctgcaagacatcccaatccatgcgccagtgatgctggtgccaggtaccttgctgtgttgcggccttggtagggcggtagatcctgtgggagtcatgggttagtgtgtgggaagtagataggtgatcaagctctaaattcgtataacataccgaacagtgcgggcctgaaggtcagtgggggctccggagagcacggccgcggggagagttttgccgggctcactgccatccatcacacgcttgggcacaggggaaaattgcctgaattgaagccagacttgttagtgaaaggatctgcgacggaaccaaaggggaatgtcgtacgaggtaccgtggtcaatggtggcctcataatccagcttgtgatgggtcatagcctcggcgggggtctccttgttgatcaaggaactgtccttgagaggcgtggtgggagcatccgaggtgttggtcttcacggaaggaacgccaacgggggcattagcggagatgaaacgggcattgacgggcacagcaagtcggctggcccgaaggctagcagcacccccgattctgaatagtgacattatgtctttttgtatgcggggaatggtcgttgccaatgaggtcccttcagatcccttcaagtgtggtttggttgcgaatgacaggcaggtcacgacaccaccgaatcgggtttagccgggcttggcaagccgaacacccgcagggctcggtttgttcctccttcctcctccatcagctttctttggttcacttgcgccgcgaatcaatgtgagtccacgtctctaccaccctgcaaatgcccattgacagccgctctattcattgcgcccaatctctgaccccctttagcctagacaagatgagctacattgcccgccgaggtctctcgaccttgatcccccccaaggtaagagcatccctgttcatggctatttgtagtcaatcgactcttcaaacgatgctaattgttccttaaggtcgcctcccctaacgtgagttacccacacactgccatcttcgacttagtgcatctctgccacacccgtcccgccccgaagccgtttttcgtgaaactcgcgatatgatcaaaatgccgcctttctttcgccttcataactgacaaactctcaatcaaggctatcggtgccgcccaggatgccgcccgcatggagcgtgttgtgaccttctacgctggccttccccgtggccccgccgctgatgttaagcctaccggcctcatccgtcgctaccaggcccgctacttcaacggaaagaacgcctccggtcttcgtacgtattcgtccattgggatcttgtattgatacaagactgattttcatgcagcctttgtccacgctattgccggtatcttgatcatgggttacggcatggaatactacttccacctgcgtatgtgttccagctattaccctgcttatatatcctctatatcgtggggacatccactgacttgatttctggactaggtcaccacaagaaccacccccactgagctttctctttccaccgaataggtggaggattgatgtatatactggatcctctgtcctagtgcaagggaaaaccgtggttttagcgagaactttagaatctcactgtgtttcaatattcagatttaccatcctttgttgttttttagtagatttggaagtatacatattacgtagaagcttgagtgacgggctctttccatagtttttcatcacatacaaacttcaaccggacatcagaaattctcaccatttgcaagcaacgacatcatccataaaacccaccctttataaaccaaacgaaccgtcaacaaaactagggctttcgaagagatcttaaggtgtgtgggcagacagacctcgcaactttcgtacgggccacgctaaaccgaaaacagcgaccctcagcttcaacccgagctgactcttgaatctcgtatcatccaccctatctttgtatcatcaaccgtccttacgcataatccctccctctttgccctaatccctttctgggacgtcttgggctgcggacttcccaagacaaacgcgcctatcgattccgcgatcgtgctctccacaccaagcctaacttaacacgggctttctcatcatccgagagagttggccaatactacatctggttgtgatatcccatatattcagggtgcaaccagtcaaggaaccagtgcaactgtggcgatccttggtatctgacgataggtatgtctccttagaatctggcatgattgatctgcagctgcctattacgaccctgatctatctccccgctgtcagggcacttggcttacttgttcgcaattattgtatggaatagaatcgagtattgttatggcagagcagagcaaccgcgatgtggtagatcagaccctgtcgggcggcgagccttcgccttccgacgttcctgcgagcaccaacgacaatttatctgctggaggggacgcagggaagaccgaacatatcgcaatgactaccgctacatcgaacaactcaaatttgaaagatcagcaaaaccatgataaaacgaaccctcctgattcacagggaggaaaagccgccggtgacaaggatactggaagctcgacgacggtgagctcgcttctggatgcgctacagagaacttgctaatacgggcgcaggatacttctaagcaaggcaccggagttgttgcgactcgagttcttgaacttaatggcctggcgtcggcatcggacggcggagaggatacagcatcacaaggtggttcagaatcggatgctagccgatcagacagcaggaatcccactcacggtggctcagtcaaaaaaccagcaggattcaagccagtttcatttgccaagttttcggtaaacaaggttccgggggctccaacacaacctaaggtgcccgagaaaggtaacttctttgttaaactgtctcatagttggctctaacgtgttcagcgccgacctctacaacaccactcggcaccccacagccaagctcccgaccgcgcttggttgcgaagactacactcggcatgcgcgattcgttcgcgaaggctggagcaggcggaggcaagcctggtggatcagggcctgatccaaatcaagtgtggaataagaatagacgtatgtattggtcatgcgatgcagtgaaaccacttgaaaactaactgatatccgtgtagctgttgtgcccgctcctccgaaacacttgaccgatgaagaattgaaacaacaatacggaattcatatgacttctcgtatccaagaagatggggctgttacctccgaagcaaagtgggcagatattgatgatgatgaagacgattgggcgcctgagacgattgagtggacagacggaactaaggtcaatctcactcaacctcacactgaacccccgccggctcccagtcatcgggagcctaaggagttaccgcctgcggaaccaagcatagtgaaggagcccgtcaaggttgcgccgaagccagctatatcaatgggatcccgtgccatggtactcaaggttggagcgaacgctgaacggcaagcgagaactgcgagtgcttcttccaacggtacgaatgacaaagttccatctagctctacaagcccagcacctccgtccaagtctccttgggccgctctgcctcctgtcgaaagagtgtctccagtcaatggcccggtccagcctcaccaacagcgcatgcccgtgagatacccacagagagatgacggccatcatgcctcaatggcaatgccacccaaggagattgcagcggatgatttcaaccgtgcatggaaagatcagtcagatttgccccagcttttcaatcctcgatcttcccagtatgagccggtgggtgaaaccaggagaggaacttggcgtcatgaccaacacccccgtgctcctgcagttttgcagaggccacacgatcatccgagtggaccggcagagccatctgccgcattccagacgcaccgatctagtcatcaggacggtatgggctggggtggtcgccgtcgcacatcatcaaacgtgagcggaggaagcggaggatttggccgtaggatgtcagctggccgatttgatgcccctccaagatacaatgatgctcgaagaggttcccaagtgaacggtctaggtgattcagcaattgtgggtcacgagcagcaccatggcaaagacgaaattgctccgtctggtccaaatggtatagcacgtccagctgttgatgtaggtatgtctcctgtggaaacacaggctgcgattcctcaagttcctcaagttccgcaagaacctcaggaggaccctgttgctctacaacagcgtatcatgaaggagaaacttctagaggccaggcaacgaagaattgagcaggaggagaaagaggaagcggctaaaaaggagaggattaggcaacgtctcgcggcgatgggtccggcgccagagaaaaagactcccgaatcgcgcaaccccccatctcttcaacctcaacctcaccatcactctcaccctcttcatcctacccccacctcttctcaacttcctattcaacctctccactctatttcttcacctcccaaaccacctgttccagaacctaaccgggaaccaaaacagtatggtatgatgaaagtgcatcatccagactctgtcaagaaactcgttggtgcacatgaccggaactcagagcaaaaacatatcaaccgacgtgtctcttcaccccaccaagaaacccatcgcgactctgcacccgcatctgcctcccacttcaaaaccgaacctcactcacccgtccagaacaagacatctgattcaaagctcgacgagcacggtactcagtggcaaggcaatttaacttctacttcgccgtggtctcatccaaatatcactgtcccatctacatctgcgaaaaatctatggaaaccgtttggcagtgaccgcactccaactctcggtaacggcatctttgatcaacctctgggaactttcacatcacgtgaaaatcctctaggccaacttggcttggatccgtcaaatatggcttcccctcccaagttctctgctcctaaggagccaaccgattctttgccatcacctgaggcacgtcacccctcatttgaacccctcaatccaattggacgccctagtccgatcggaccaccgagcacacggaatacgaatactcgtgccattaccgactggaataacttccacgagaacgctttggaaaaggaatccgagaacgcgaaggagttcctcaagcgactcaacgacagacagaagggagtcccagcaccgccacccgcacctgtggtttttactgagacttggaagaagacccgtgccactgaagacgggagacgagtcatcacccgggtcaccgaaagggttatcaacaatgaagaagagattgccaaggccaacgcggccacaaaccagcaatctaaccctcttacgagtctagatgctcctatggatggcctcaacgtgtctgatatcggtgttcgtccagccggcaatgtttctacccggagctcccgattcttcccctcggcatctgaacagtcgaaacgccaggtcgccgagaaggagcgcagcagtccttcgccccctcctcctgaggaagttagccaccctgtatattacggagacgcgaagcggccccatgttaatctcccggcccctaagcctcccaagcccgtcgtcaagctcccaccgaaggccattggtgtcccagcgcccccgccaacatttgcttctatggcagctgcgccaccacgtcatgcggtgcctccttcttccactgcgctttcgtggcaggacaagatcaatggtctcttcgggaagacaactcctactcagaagaagagtgtcttagctgtgacatcagctaccaaggagcctcttcctgttcacgctactgctgtttctgtctctatacctcagaccaggattggtctccaggctggcgatggcgatttcgccgttcgacaagtcaatgaacaggatgagatgtttgaagaccgcgaacccggctctttgcctgccgttcgtgtgccgaatatggcgccccagaattcttggagcgcaactcgtccatcagagcgaccccgtgggaagaacttcaagccggtgcaagcgcagagcattcaggcattcctggttggacacaatgatcgggataatcatggtaatactcgcgcatcggttttccttccaggtggctctgaacccaaagtcgttctcatccaacgcaaggctggatcgacccgaggccgcaatatcaataccaatgtcagaccccgcaagggagtcaacaacaagtctggggaagtgtctggtggtggcaacaagaagcctccctccaacaccatcccacgacagcaaccccgtcagcggtcgggctggagcccagaaccccccacttctcattaagaagtatcggccttgcaagcatatggtttatctgaaagcgttttcggtatcttctctctggttcatttatcttgcctggcaggcgagaaattggggtcaacctcgccaactcctaatcaacatttgtttccgactcttgttgccattgcccacttcgttactcgtttctgaagttgggcccacatttcagatcctccctctaccccttcacgcattcgcgtttctcatgtacttgtgatttccagtttctcacctattgtgtcccctccccggacccattcggaattgcggcttttcttttggcttttgatgtgtggacgatcaccgtctacagattcgacgccctgtttgcgcgatcattgcccaagtggtgcatgcttgttctgacctagcagtatcacattgccgagtattcagccaaatccgcacggatacttaccaagagaattccattgttacacaattccatgttctttttctgttgtaaacgtaatctcgagctctcaagataggcaaataaggtgagctaggtaacctcttaccttcagctgggtagtttcgctagaataaacccttacaccttgtaattagatagcaagatggtgaggtagatttcgactgggaagttgagggtgaaagtgaatggacaacgctgtcgctttctcgatgagattgtggaagtagtagattgatggttcatattacggtggctttactggactcacatcagaagaagacaaaaaagttctccatctacgacgatttgacatactaagtgatgaaagagtttaataaacaacaggtttagaagtataaacagaggatagttaaagatttaaacatatgataggtatcaaccgaggaaagcccctacaaggctcaaaataaacgccttgtccctggaatacgccgcccagatcaacccaaaggtcaaaacaatcgaatcaagagacatggtggcatttgtgatgcgacaagtctgaagatgaccatcgtttcgacgtccataacgcccccaaaccaagcccgaacatccattagataaccacgcatattaaaacaggtcgcatgatattgaacaaaacgaaagtgagcagagatttctcttcaccagttccaggtccggctggaagcagcaaagacaggaggcttccactggagacgggcagggtcaattttgcgcgcgcccttgatctcctccttcttgagtcgcttttcgtgctcctccacgacctggtccgtgagtacaatgacccaattacccttctgcaaagagagttagtaaatcacacggtattgtatgtactgcagtacagttatacgtggaaatcagacttacgtggtatcggagcatgttgaatacaactagagtctcgtggacgtccttctcagtcatggaagtgagcaccgcgagctcgttctcgcttatagcttctcgggtcggctcgatcaataactccactagtgtctcgcgccagtactgtcgataaccaagtagacccaaatcactgagtggcttctcgggggagccgagcttgccttcacgcttgctgagctcgtagctgaatgagatgagcagacggccgaagccgcggcgttggtattgcggcaaagtcataatacacgccagattatacccctcagcggagtccttctccttagagaagtagccgacgaaatggcagccggtttcgtcgcgagtcgtcatacaatagaacaggaatgggtcgacatcgtagtaaagcgtcttgtggtcgaggaagagcttgctcaggagacacaggttccggcaccaggtgcgctggcgacggccgtcgacttcaaagaaggagatatagtcgtcgcggtaaatctcattaccaggtgggtgggtcaaggtgcattttgcgcgatggcgctcgaaagcacgcttgttgtcaaaatagctcaggcagaactcgtcgatgtagactaggtcgacgtccgagaaggaatccgggtacggcgagaagtaccacggctcgacgtcgtacttgcccatctggaggcgggtcaagtttcgcacgcgatggatctccgtcgggttctgtgtcatactaccacctgtgcggagtcgctcgatttcctcccctcgtgtaatcacctcgcctgtggtcgtttggacatgatcttcttttaccgatttactttcagctgcagcatctgccatttcgaagtcttctgactcggtggccttgggtgtgccggctgtcgaaacagcctcagatgggaacatcgatgagtctccaggtgtttcgacaccgaggttttctttgcctccagccttcgagggccgtgacaacttgccgacgttcgcattattgccgcctaagatatcgggtgtttgtgacatatcacggctttcagcccgagcacgcttatttgcattcacattcttgctaggcgccgctttgctggcagcagcggtcttctttttatcagccttatctggctgaggccattcaacttcttgggagagatcgatgcgagaagacgcaacccattctgacaaacgagtcagagaaaagtccaaatgaatgcatttgtggaagtgggaacttaccatcaagacgtttgttaaaatcgacatagtgtacgctgggttctatatcagcaccaattcgaaaaaaaaaaaaacagacacaatatgaatagaggcaaacatactaaaaggaaggaccatcctttcgctgtctgattgacagaatctcagcttttcgcagttctccgtcctacatagaatagtcagtatcaaagcccatactgattgataatcacgtgatatggacacaaaaatctgcgaccacaaggccagaacgaaccttctgcaccatggctttcacaccgattctacaaagccagttagcacttgcgaccgatgaaagtcgacctaaaaagcccaaggctaattattctggatataaaaagcgacatacctgatggtgttgagtgtggcgaaccctctgtcaacggggtcgggcgtccccgtcgtctccccgtgggaatctcggacgcccatgttgtcggactggaagttaggattgaagcaatatcagagatgggaatgatggaatcgagcagatactgtggtcatttggtgatggggaaatgatgcgggaaagggagcaaactgggtgattgttatgtaagctgttccgcatcggggtcccgagtctatacaggacttcattcagctgaagatttacagagtacaactatattacaagagggggagggaaatcttttcatttcttgaaccatcccaaatgataatgccataaacaccgtctcccgtttgcgggatttacattcccttccatgttgtcatgatcttgtagataaaatgcaaagtccaaacctacgccaagcgccttgcaatgaaccagagatgaagagcagccgagaaagaagccatgtgctcaacctaaagactatatacgtctttcccatcacccctcaaatttccgcttgacaccattcgcatttgcggacggtggcaaagcttgggctctccgttttttgtcctcacccgcagcagccatattgtgctggcgctgcttccaagctgttttgatgaggggagcaaggcggatgagatcctcttcagtgacgcggtcctcaatactttcaagaaccttttcaacagtggagatgtggttcgcatcgttcttgtcatcacgaagacgatggaagcgccagcgtccttccatatctttggcgcactcaacaatagtgtcatcaagaggaatgccaagagctttgagatcttcccattcctttggctcgagaaacatctctccaaaatgacggtactcaccagcattgagcatgacgaacaggtggcaggttgggatagcgtcgtagtccacgtagggctgggtgataccatcagcctcatcctcggtatctggctcgagtgtcggaaactcaaggcgcatacggaaatcaacagtgttctcctggggtggcttccatttgaggatgtgctcgtcggtgccgatgcggtacggagtactgcggcaagtaaagatgagaccgtcgttgccgtgaatgcgcttgaccttgggaatgatttcgcggaacatcatctcaaggccgtaactaaattgtgtggatttgtcctcgactgcgaatgggcggtgattcttctcctccgggaatttgcgatacatggcattgtatggcctgagtaccttctccttgaagtatgctagacgcttatcaagggtacggtgcatcaagctttgcccgtccagcaccaggcagtcgaagaccagatatttcagctgggtggttccatcctcgtaggtgtcgttgacaagctcgccgtcaaccagggtgtcgacgtggtatccctggaaactttcgtcgttcggtagggggaagtgtaggccgggcacgtagcggtagtcgttcttgcgatcgatcaggtaatgaatctcgggcatatcggagtcgggatctccgcgcgcaaaatacatcaggcagcggataccgtcggtcttttcgcagacaaagtagtcctcccgctgtagctcgacaaggtgccgcgacgagaagctgaccggttgtgcgccagggaagttgaggttgttgcgcccgagaaggttggcgacttcgcggcgaaactgatcagctaggtcatggtcggctttgatgccaatcgcgtctagatcggggacagcgtggctcattgtgaaaagttgaaggttcagagggactgggtttatggtgtaagaagctcaaggatgagtctgatagtcctagatttccagagttgagaggggggtcgagctgcaatcaataagactcggaaagcttgatggtggagtagcaaatgcacagggcgctcgcccgcaatcgcgacaatataaaccagacgcttttcagctgcaggtggctttggaaataacgaataaagaggatcgcccaagggtcatagtatggctcgctttgctcatgctgtcaggtctcaaagacaatggatgatcggcgaacggaatgagatggatgtccttatgcctcaggcacacctcacgtaatctgaatagcttcacgccctgggctattagtgcatagcgtattcattggggtgtcctacatggttacagatggcatttatgcttacagatttattagacagagctcaatgaggtagaaagtattcaatcgcaacaactttcgaaacttgaatgtacatatcacgccagtcggggtatcatatcgtcacctttcaaagcagacagaaccagcctgtacccatggcctatccagggaaatcgaggaactaaaaagatgcaaagaaatcaaagaagaatagtacagtcagtagtcctcctgcacccatgaacgccagcatccagtatccagtacacaccgtaaaagctcaaaccttttcaaaccacaaccgcaaacaaaaaaagagtcgtcataaatcatcgcctgatatgcgcaggttgattgacaagccaatcaagaggcagaagtgaccggggttttgcggctacctggaacagcagatcttttgcttccatccattccaccagcagagatatcaggctccccaatggcgtcaaccgatgaggatgattccaaatcggtcgcgacagtcgagaaaagaataccaccgaaaagaggttggctctcctcgttggagaaaagtccaccgccgtttcgaactcccatggcatgcgacatctgctccttgatgcggacatatcgatacttcgacttggtggtgatgacggggtggcgcacaaggggttggggcgcagaacgggcaatggcggccatgacagcgtctctttcttcatctgagtcaataggaccggtgttctcgatatcttcctgcagaggagcgttggcatcgatagccgcctctgtggttcgaatgggttagtcatctcgtgatctataggagcagcataaacaagataatagcaaacttactctgctggcgagcctggttcttcttctgatactgctggagaagcatatcatatggcagtgtccggccaggaaccgaacgcttggcacccattgaatggctcttgcaggtcaaggaacgagcgcactgcgcgccgttgggaagagtgacaccgcactgtttctcgacatcgacagggcccttcggtttggccgtcttttgcttgacctcatccttcttcttctttttctttgactccctgccatcctcttcatcggccttgcgcttcttgcccttcttgttgccgtcctcggtacccttggcagcgctctttttggcgcttttctgacccatgttagggttttctccgtcggccttatcggcaccgtcatcgtctctatcatcgccggccttcaggcgattggccgcgtcgcgggcttccttcttcttgcgcgccttctcctgcttggccttcaagcagccgcggacatgatcagctgcggtttgcttgagagtgggccgtttgcaatgcttgcagatgacggtctcgaggaggtcatcttcacgcggcttgccggtcgggaacacggaaacgactttgctgtcgagggagggaataggagaggcggtaggggaggtatcgatagggccatctttggcttctattagtttgttagtatcattaattcctgtgaaagcatatccagggagctttaccatctgccttcttcttggtagacgccttggacgtcttcttcaccttgatcttgccgggtttagtatccttgtctgtgaaagtgtacccggacgcatcaacaagacttccccgtcctgtcaaaaaatatagaattagctcagatcatttgtagatcgatgcgccgaacttgatctcgaagtatcctagatgctttgcgcttgacaggaactaggtattgcttaccttgaccggggtcaccattgttcgccatggtgagcgcaaagggagagagtaccgagagacagaacgctttcttgtcactcggaaagcctttgaaatggcgtgggggtgtttataaaggaatgagttcagtcgccggagtcaaggtcgggctgggctccgcgttaggatcagtcacgtgccatctgttgatctattgaataggcactttggcttctattttgctctgcgtgtaacatttaattctattgatgagaatagctaatggtagagactgatgttcttccaagcaatttcttgatacagtacattgttggtcaatcagattaaccaggcagcgactctttttatgttgtaggcaaatcagcacctgccaagcttgtaataagagagttataatttgatggcattcaggacgttaagtatcgcatatagaattgaatgatacgctgccctaagaaagagtagaggcttcatctttataggctttaagattaatggtaggccgaccagcatagaataatagtcaagtcaaaggtagcatacttagtcgcccgtgcttctggctccaaaaacacattgttgtactcaaacaaatattcatacaatatcatacatgttagaaacaaatatcatgaataatgtgcaaagcaaaggctactgttagtgccaccaaaaccaaaactatttgtcaaggcaacatcgatctgtcgtgactggggatctttcggcgcatagttgcaatcaaacccatcagccaagcgatctaggttgatagtaggtggcatggtattctgttcctcgttagcaagaacctagcacagcatgtctagtgtacagccactcacctcatggattgcaagtacactgatcaaagcttctatagcaccagcaccaccaagcagatgaccgagggcaccctttgtgctgctgacgttcacatcagcagccttatctttaccatcagggccaagcaggagggccttgatagcagcgttctcagcagcgtcaccgacaatagtcgaagttgcatgtgcattgatatagtcgactgcagcaggacgtaactgggcttgcttaagcgcctttttcatagccataaacgcgccttcaccattttctttaggcgaggtcatatgatgtgcgtcgctggagcagccataccctttgagttctgcatagatccgcgcccctcttgccagggcatgttctagctcctatactttaggcgtcagtatcgggttgtagtatgcgtataggcaggacatacctccagaaccatcacagctgcaccttcgccgactacaaagcctgcacggtcggcgtcgaacggccgtgacgccttctctggagtatcgttaaaccccgtcgatagacttcttgcacgcgcaaagccgccaatggccaaaggatggatacaggactcggcaccaccagcgaccattacatcggcatcaccgaaggcgatgaaccgagctgcatcgccaatggaatgggcaccagttgtgcaagccgttgttgcggaatggctcgggcccatgaacccgtacttcatagagatatgcccagcgccaaggttgatcagcagcttcggcacgaacagcggattgacctttttgtagccctgtgcaataagttagctgtatgttcctagatcttatacgatataaacttacacccttgtcgtaggcaataactgtgttgtagatttcatcaaaattcccaatgcctgatcctagacagattccctatcaaaatggttagtatagctgtcaagcttcacatattcccacacatactgtggcttccctctgctcaaaaagcttgggcttccagtccgcatcttgaagcgcctcttccgtcgccgccatagcatactgtgcaaacttggccatcttccgctcatcctatccattccaaagtatcagcatcacaaataaatcacaaatcacaaagtgaagatagctggcttacaccccgactcaaccattccgaggcagtccatccaccattatcgcgattgccctgtgggacaacggcagcaacctgacagggttgctcggcgaagcgctcatcgcgatccttcacattcacaacgccgcaatggccatctaacaagcgtttccatgtacgccgaatccctgcagccaaacccggtgttagtcacagtaacatgcgcatgtgaaacccagtatgtatacggcgggtaatgtctcttatcttcccggtccgcattcccctcattggctgtcacgaccttccccttccggagtgggaagtggagaacgaagaagctcgacagctcggagtccggggatatcggatagagctcccggacaattagagatggatagagtgtgctggcattgtcttgctgacagataattgccgaattgtgtaattgcatgcattgtacccggtcacatgtccaggtgagctccaaggatgacctcgaagctatcgatgccaaaacaacaaaacaaaaaaaagaagcaactcacctacacctagcggtgtcaccgccccaagaccggttacaacgactcgccgcattgcatcgttaataactttgtataaaagctatcggaggagttgtcaaaagaaagaaaaccgaaaagcgggccacggccaagaagggaaagtcttcacgatcgggacaaccctatctgttcgtctttccctttacaacactactgcttcaggaaacttgacgagatgggggttatgtagaaaaataaatctcttcatttccatcttctcttttacttcatcccattaacttcagccatgtctgcttggaaaaccttcctcacactggctttggccggctccgcggccgcctgcgcgcaccacgataacggcgaggtagtgcccgaacatgagcgggcggaattactcaagaagtgggatcaggaggtatgccaatgctagaatatctaaggaatgaggtccgaacgactgctaacatgtaactatagtggactttctccggcattgccagcttcgcccacctgaagccggtcaggtgtcttatcgagcccgatgagaactacgacattgccattatcggtgcaccatttgatacagccgtcagctaccgacctggtacgactcaccaccaccacatccaacatccaaaccaaacctacgaaacaaaatactaacaaacccccaccaggtgcccgcttcggaccacgcgccatccgcgccgcgagcgcacgccaaatggccggaacaggctacaacacgcgcgccgggatcaacccctacctatcctgggcgaagatcaccgactgcggcgacatccccgtgacaccgttcgacaacggactagccgagcgacagatgtacgaagcgttcctcgagctcggatcccgcagcatcgtgaacaaagcacccaaggcgaacgggatcggcgcccagcaccccaagctcatcactctaggtggcgaccacagcattgcgctacctgcactgcgggctctgcaccagatctaccagaagccgatcacggtcgtgcacttcgacgcgcacctcgacacgtggaatccggtgcggtacagcgcgtactggcagtccgagcagacgcagttcaaccacgggtcatttttccacaaggcgagtcgcgagggactgatttgtaatgctacttctgcgcatgcgggactgcgcacgaggcttactggtgttgatgcgggggattatacgaacccggggcctgagcagggattcattcgtattcatgcggatgatattgatgagcttgggcctatggggattgttgagacgatccttgcgcgcacgggcgttgatcctgagcagcctgtttatctgtctgttgacattgatgtgttggatcctggtacggcgcctggaactggaacgcctgagcccggtggttggactacgcgggagttcattcgaatcctgcggggtttggagaagttgaatattgtcggtgcggatattgtggaggtttcgccggcttatgataataagggagagactactgcccttgcggcggcgcaggttgcttttgagattattactagtcttgttaagtctggtgttgatgaggagcttggtgggtggtatgggtggatggagcaggaggagagaaagaaggagcaggagggtaaggatgagctttgagtctggacatttggacatttagatctacgagatgcatgtggaatgaagtgaagaatgaatgatatctatttgaatgattccttccttgcctgtagactggagtgatgtcatggcacagtaggagcctgaactcatttagcctatgatctcacagactcggacgggagtaaccttggaaatacaatatcaaaatactacaagctacgtgacagatacacgttcaacccaaatgtcttcatagaactggttgtattggagtctgtaactttctaatgacccaaaataacgttgctcttcagtgagacataactcaaaagactgcaagagatcgcagaaaggacgtaaacgaagacgcttgtatcaagaccgcgcgcatggagagtgatggcgattgtagatcagattggagtagaggaaatcacaagcaaaaagacgcagagaagaagccggatctgcaagggaagggtacagcaagctcaaattcatagtccggggtcgcaaagctggggtacataaatagcacgcgaagaagaaaaggacaggggcatatgggggatatgggacaacattgacggaaaccgtccagccaaaacacgacgccctgacgtccaacgccgagagagacgaccgaagaggtgaaagtgccgggtgcggagagggtaataggtgatatgtggggagtgtagtcgacgcgacaaaaaggggagaagaaggtcaaaattgctgtcgctgtagttcgtgaaggagaggaatgagggtagaggatcgggatcggggaaagtaaaaggtaatagacgagcaccgaggtagctctagaccaagtcgttgaatatggcaggtagatgcggccaggcgaaccaagaagaaaagtagaagcagagatagagagcagaaaagggacaaggcaaactagagagattagggctcgaaccgggatatgcgaacagagacaaaataagagagaaggaggtcaagaaaaagcacagaagccattttcaaccggaaaacgtagatatggaacgcttcagatagcatcgctagccataatacaagaccacactcctcccccttttttttgtcgctgaatttggatatcccagaaaaccagtccagtcagaaatatttgccgcccaatagaacgtgaagagtagaaaaagagataaacaggttcattccatcgtagctgcttcgaggcgcgcgtcaaccaggcatcaacccaagtgcaacattatccgtcgcactcggaccaacccgttgcgataaatccgtgaagggtaacttcacagcaagcggcagccccttgacttcttcttgggcgcgggctcgagtgccgcgacaatagcctagaaaggtagaaagatacggtgtcagtggcggtgtggagatgtcgggcagcaaaattgaaagactcggtgtacctcatcaaagacgtccttcagcttgtactgagtcagggcggaacattcgacgtatttaacggcgccgagttccttggccatccggtcaccgtcttccttgcggatgggggtcatcttctggcgagcgagtttgtcccggactccggcgtcatcgcgtaaatcggtttgtgtgccgacgatcagacagggcacaccaggacagtggtggtgcacctcggggaaccacttctcccgaacgttttcaaaggaggcgggcgaggtcaccgagaagcagaccaggaagacgtcggtctgtggataagagagcgggcgcaggcgatcgtaatcctcttgaccggcggtatcaaacagtcccagggtgtaaggctcatcgccgatcctgaatttggagagcgatcggttagaagtgtttctttgaggctagactgacgtataacttttttcttctcgggggggaggggtggggagatgacttacatcacggtcacggcgtagttgtcaaagacggtggggacatattccgaagggaacttgttcgttgtgtatgagatgagcagacaggtctttcccactgcaccgtcccccaccacgacacatctgggttggggttagccatgagatctggggggtttttttcgcctcggcaaagagtgaggagatgaagcgagatggaatagcgtacttgatggtagcgacgaccatgttgaattaatgagaagtgttgatgtaggagtgttagagaagagaagtgtgggagacaaaaagggaggaagaagctgtggtctggattgaatggggcaacccgcagagtatggagtctagacacggtgctagtttcgatacacggtctgtacagcactcgcttgcttgaacagcttcttggtattaattgtgttctataagagataatttagatctagcattgtcgtttctcatattttgcactattctatatgatctaatactcattcactatgatatttgctgttgatgtcattcattacttgccaagagaacggtatcagtatctcgactataaatatcagctcaagcgctaatcccctattctattctttacaattgctgtatcttggagactcgaatttaggatatgtaggggaatgacagcttcaagtcagtaacaggtgcaagtacgaaacacccatcaccccaataataccccaagtaactataacttcagtataactagttaagataagccccgtcgaggaacaaaaggagacccccggggtgtttaccccctttttccttcgagtcgactatttctttcacccttttggagaaaagaagcaacatgggaaataattaaaaaaccccccaatttcattctcgtttcaccattcacggtcccccggcctcccctcggccctaaatccccccctttccaaaccgtcgttttacatcgtgtgatagagatccgaggacctagatggataccataaaatacaatccatagtacattcatacggttgacgatccaatccagctctcattattacctacgttgtactccgttctccgtaggtgccttgtttccatcacagcttggcagcccgatccaggtccagtctctgcacgactagcttcactacgttggcagagcttgccctggcgggtgcctcatattactagctatctaagtatagcgacctatgtcacctatggttctgattgatggcctgacagctgacaactgacgatatattgcaggatgcgtcctccatacggaatacctccgtacaatatacattgattgacagtaagcacatgcacatgctaggggtgccgggcagatccaattgccatctcatgtatccccaagcccctccgtcgcggtatctggtctgcatgcatgcatatatatgcaggtacataggtacatgcacgggtaagatacgtggataagacgtggtgcgtatgagagtcctggtatacgagctggataaaggcggggtgataggctggatggagaagaaaaaaacaaaagattcacgtatttcaacctctacaaatctagcaaggctttccggattggaaataaagtcgatatccaaatccaaatccaaatccttcccgcatgacggatagcagtggatataaggccgcgatgcgtgaagttcgggctggactagactgggatatcttcataggtcagtgcaaagtacctctggtgtgccacaccggggcgaattaactttatttctgctgtttcagggaaatgaaacccactaggccgtaactgcagaggatgttacagcctgaggggcttagggcggcaagccggcgggatcggaataatcgtctggttttggtgatgattttgatcggaagcgccggagcgctttcaaggtttggagtgtgcggatcatgcttgactaggtggcaggacgtgggtgttatctttgtcgaggttacaaatcactacgatgtgtagggcaatgtagcagggcaagtctttcgctaactcgggtattcatattttcggcgttgataactatctcaattcattgagctgtttcagtcgtagaaagatagatacctctaatcccgtgaatacgtaaatagtaacgccgaatgcaaatggtggattggctcgcgtccaatctgagtgaacagaatataacccgaaacgcctggttgtatcgagatgcaaaaattaagccatggaaaagccatggaaaagccatggaaaaggcacaaaaaggttcaattcgtaagatcgtaatcgtctgtgtgttgagtgcacacaggaattccgggtttaggtccgtttggagtgtccctcacccgagttgggctctacttctgcctcaactggaggcggggcgccccgccgctcaggactaccatagcccatctagaatcaagtcagaggagatcatcagataccacggtttggtgacttaccttgtcaagtttgtagtcgaccatgagaagactcagtggaatgagggggagggtagcgatgacagccagcgtcaacagcctgttcatggtctcttggtacgcacggttgatagcaatgcgagttggagatcccattgggtacgacagagcggtggtcagcttgccgaagatttcagcagcttggcccttgctttcctcggggaggtagcggagaagcttgtttgggatagcagaggaccacacggctccggagatagcagcgccgactgcaccgcccatctccatggaagtcaggaacatcgcagtggctgctgcgacttcctggtggctggcggatgcttggacgcccagttggacgggcacgttaaccagaccgccaccgatgccgaccatgatttgtgtgccgaggacttggaagtgcgaggctccttctcctcgacacatgagcatgagggctaggccggtcatgtacacaacacatccgatggtaatgtagatgcggtatcgccgggtatacttgataagaagtgatacgctgaatgcggcaatggttgaagtgaaagagaaggtctgggtgacgcgcccggcagtggcaacgtcatatccttgtacaacctgcaggtaggaatagagataaggttgaacggagaagtagaaggccactaagtagggttagcagggacacctcgaaggtagagagaataatcaattcactaaagtaccagaacgccaatgcacaacccgcaagagcagttctctgcttgagcaggtgtagagagagcaagggcttcggggccagtttccgtgaagactcccagaacggtagcagacacaggcaaacaataccaagcgcgatcatggtcaaaatactggtgttctgccacccgttctttgcggaggccgcaagagttaaaggcaccagaattaatgtgacggcagcggacaaaagggccagtccgccaacgtccagatcataccaggtccgacgcacgacgctgacaaaatctgttcgttttctagtacgcttcttgatcaaattcaatctctgggccttgcgctgattgaagagcagggtgagggcgagtggcaggaaggatgcaggcaagataatagcccacattccataaccccatcgccatgaactactgcgcagcaccgcgcccgcaatagtcggtccgagccagaccgtaaccaagaatgggaattcgggcagtagggcgaggaaggcacggttcaacaggtcactgctgtcggcaatgaatacttgttggaggatctgcaagcccgttgagccggcggaataaaagatttgggcagaggcgtaggtttgaacgttggttgagccggccatttggatgtatcctaggacgtatataaggatgctcaaacagaaagcctcgaagcgaccgaatacgtcggcgatcttagccatcgggggtttgatgacagctatagattaaggattagcagccgcttattgaagcggggtagtagatctcaccattgaccacattttgaataacgaggacggtcgagatcaatgaatgtttactgaatgaactcgtcgcatatgcagacagcgacatcacagtctgaccttccagcgacgtgcagaatgccatgaggaatatactttgcgctaagtcagcaggggttcggcaagaaagcatgggactgcaagccacacgaacctgacgtaggccaccattaaagacttggtcgtccaagtcagattgatggcttcaatcttttggactccctcctgaacttcatccggtgtagacaatccactaggctggccctcgacctggtattcatcctgcaacagttgatcccgttcatcctccatcctggcgcttccgtgttcaatagtgccgtaggacggtcctgagcttgaatcgagaagcggcatgtcgcgcgttaccacaagatcgtatacgttggaagtattctctaatggacagggtccatataagaataaccggcaagagagttcggtctgggattggtagaaaccatatacgaaagacggcgaccttaaaagcgacgattaagcgagaaacagaccatcaaaaaaggagttcatgcgatatcaaacgtaagtagcgggtgtatcacataaaagggatggagccctgctctaataagtagtacttttgctcttcagctagatagcccgagccactcaggtccacagagaagaaaaagaaatgacaatacgggatgtcaacggcgaatcagagactgatttaggacaggacaagaagaaaataaatatggggcgtgatatgtaaaaagatgtcgaagcgcgcttgcctcggggggtcgacccatgaagggctattaatattggaagtaagtagcaaaatccggtaggcagctatggggcaaaagatttggcggatgggtagatccgccgtgcttcggagggcgacgccccaaatgtaaggggaacaggccttgaagagtttaggcttgccagtctgcgcaaaaccacaccaaccccgatcgtcggtcgcacttatgcacgctgatggggtctgtggtgtagtgaggtgagatgagaggctgaggtccgatctcagctcgctctctagcattccaggttgctgcaccaggacagtttaagaaacagtgtcacgttgcaatccagtcatcattctgggatctgaactgcccaggtagttcccatgtattctccgcaaaagagatggaaaatgtgtccaagagagaaaatgcaaaagaggtggagtttcaggcacggggagcggaggggcacccgctgaatacacttgttcactcggtggcatgagctgagtctttggtactgccaagtcacggtttccctggttcacgtcatcagataagatggaaccttgatctcttgatctctgttatttgtttccaaagagtctcttctcatttcgaggacacttcgctacatcataatacaatgtctccactatgtggcagcgacatgcattgctaccctgtcatttattacctccgatctagggaattgttagccggaatgacggggccggtcacttgacctggctatatcattttcccttctatgcacattattaatgcactccgtagttactccgtagtatttgatatactttaacagcggaaatgaaattgggaaaaggaatgcaataattggatggcatctttcatttaggtacttctctccacttgtgtcatatccacacgcgactggtgtgacctcggcatccgaaacagggcctgtgggcgcatacacccgattgtcgggattacactgcactgggtatagtaggatcagatagctcagtgggaaggtgtaggaatatgcgctctaatgggtagtatacacatataggatagaagaagaacagcaagaggacccgaagtctatatatccactataagtattcaggggtgcccaggagcgcaatagacatccgatatagtgccaagaacgctaaaaccatatgcaatctaactatcctcagtgttcaaattagcataacctctctattaatgcatctggtaaccgcaagtgcgtcagcatggctgatcatccaccatgacaaagaacgaaccatgaatcttggaagaaagcaacttgattgactggaactatccgtacatcggctgatcttcgccatgtcagtcatctttagcagatacacgaggtggacctggaactctgtggagccgtggtacatatgtccgcagcaagccggtatccttatttctacctgaatagatcattaatggcctgccgtgttccgttgcaacgtatgatcaaactggtcttactttacaacatacttcattccaatcttcctattcgtcatatatactgttgtctcttcgcagtggccatcgtcaccttattgaggcatataactaacaacgtcctgctgacctattcctggtctatgatcaaatgactgaacttgacagaaagctccccgccctcggttgatggccgggcagcatagataccaacccagaagtcctccacattctcctgttcaaagatccaagtgacctcccggataggagacttctgcaagccctcaacaagatagatccacagactgttgtcctcttccctgaccagttcaagggttgccgaaccactacctgaaggcactggaagcaaactccagtccgcccagttatctttggcgacgacgctgaggtggggtttgccgtgggtgagttcaatgccgcacttcacccacttctggccaccaccagcagtattgaggacgagcactacaccaccctggtcatatttcttctcccaaaggccagtgacggcgacgcggatccgcttgaatgacttcagcggcacggacttatacagaatcggggccgagaaggagatcgtggaaggtggcttggcccaaatatctgtggaagctggtgttttgatggtaaactccgcgggaaggacacctttgcctggcacttcggcatcagaattggcgaatttgaattgcgattgcgacatggtgggctgtggaatgcggggaagccgtggtatattcacagatgaagtatattcaatcaccacgccacggatacttggtcaagtgggtggtttaggtggaagattgggattttagtaagtgaataaagagaataactcagcggaaagataaatgatttcgcctaggcgccaacagaacaggcaagtccatgggtgcccggacgacagctacgtcactacataccgggacttcctactgcggttaaccaaatgatgaaatagacatagagctctcaatttacttgttttgttcaatgttttatttcccgatctagaacgtatttattgaagcccagaaacatttgggctcgttatattcacatcccaccgtacagagtaccgaggccaaggcaatacatgtaccgcctaatgtaatagctataccgcccggtgctttccaattattactggcagacaatctaattgccggcagaataataatcgcaagttgtctgacaccacgtgatggcattgatgatgtaagttctccatggaggcttgctttttatcatcaacaatagctgcaatgtgccagcttattgaatcaatttgcagctaaagataggcctaagggtgtatacccatttggtaccacgatccgccatgactgcacgactactgcatcccgatgaatgggagcttgcctcgcggtcctcagttgactcgcaggggacgttcaatctcgacgaggccgatttcgaagctcaagtcccttcttcatccaaatttggtaaacgaaaactgccctggctgtcccaaatcttctcctcggcatcggcgggttatcgccgcctgaacaacacttccaaaccgattctcgcaggcacaccacgaccgagctgttctcgacgtctctgtattcgccgctgttgctacctgcccgtcgtcgccggcatcgtttttgtcctcgcgctctttacctcgctactcttcccgtcatatacccatctacccgcgcattactctacccttcgcaaatcagtactcgagagctcataccccggacgaggcaatccccgcaaggagaaggtctttattgcagcaagtctgtatgatagtggcggcaagcttgctcagggccaatggggaacacaactcttggtgctgattgatctgctcggtcctgacaatgtgttcttgagtatctacgagaatgacagcggtgacgagggagagcgcgcattgcgcgcgttagaggagaaagtggagtgccagaaatccattgtgtctgaaaagcacctggacctgaatagtataccgactgtgaccattcctggtggatcaaagcgaatcaagcgcatcgaatatctggcccaggttcggaaccgagcattacagccattgaccgaccacccggagatgaagttcgataagctactctatctgaacgatatcctcttccagcccgccgaggttccccagctcttattctccacaaacgccaacgaggacggtgttgcccagtaccgtgcggcctgcgcggtagactttgacaaccctatcaaattctacgacacatacgccacccgcgatcttgaaggttacagcatgggtcttcccttctacccatggttcacttcatccggcaaaggcgagagccgaagcgatgtgctagccggaaaggacgcagtgcgagtgcgcagctgctggggcggaatggtggcatttgatgccaaatatttccaatccggctcgccacccacaacgcctaacccagctcgcttccgctccggacaggatctcttctgggaggcgtctgaatgctgccttatccacgcggacatccaagacccgcaaaccaacatcgacgagatcaccgatacgggaatttacatgaacccgttcgtgcggaccgcctatgactcccgcactctctcttggctaggagtcactcgccgcttcgaggggctgtactcgttcctccacaaccttggcaatcaccttgtcggtctgccttggtacaatccccgtcgtgcggaagtccccggccaaattgtgaaggagactgtgtgggtccctgatgctgcgcaggacggtaacggctctttccaggttattgatcgggttgcgggcaatgatggctattgtggtcgtcgcggcctgcaggttattattcaagaccgtaagcccgggcagaaaggatacgagagtattcctatcccatcgtagacctggacattttaatgttgtggaatcagatacccattctatctattcttgttatatagatttgcttcttttggtttttttggtgtattgctattttctagaaaagctttaggagcattagatcaatgcataatttgtgagctgataattatttttcctccttcgctcagcaaaaaatagagtcgttcaggcaagggaatactaactaagtaagcaagtaagcaagtaagcaagtaagcaagtaagtgagtaagcaagtaagtaagtaaacatataagcaagcaagtaagtaaaccgcggcgtagccactaagctgggtaggttcgaatgcctaaaggcttgtatagagtatagaacctaggctaccccctacggtaggtcacattaggacaggctttggttcgtctactcccagcaaactataacccgtatgcgtcaccaccccgagtggtcgcttacaggtagctggtatctcttgagtctagaccacttaaggcgtgctgcgcatataagagcgaaatgtttccattccccccccccatttcagatctaatggaaatgcacagtatgcctatgaagtaattactatactaacacactacaacaaaatactgaggacttcatcatggccatcatctcagaagcattgatctcagtctggtcacatctgccagccatcctcgtcacccttgttatatttcactttgggcgcaaatatctcaacccaggattaacgtccatccccgggccattactagcgaggataacgaacctctggaggttcatcgatgtcgccaatggccgttcagaagtgacgctccataaccttcaccaaaaacacggggactatgttcgactaggacccaacgtggtcagtgtgcggaatttggatgccctgaaaacaatatatggtattaataaaggatatcaaaaggtgtgttcaaattgcaataactgattgatcattctgctaatatccgcaagacaaacttctattctgttcagcagcagcttgtcaaaggaagaccaacgcctacactatttactacaactgatgaagtctttcatgctgctattaaaagacccgtctcgtcagcttactcaatgagtaccctgactgaattcgagccttttgtcgataagatcattcatactttatttgggagattggatgagttcgtagctgaagcaaaagtctgcgatattgctgcttggctacagtactgtaagtctcactcttctcgcgacatgagagcggaagctgatgcagctcaaaaagatgcatttgatgtcatcggagaattgacatttagtaaaccactcgggtttcttgagaaagggaatgatgtcgacggaatcatcgtcgcattggagcatacgcttgactatgtcggaaaggtaagtattgggtgttggataaatgacacgaaagctaattagagtgggcattagatcgggcagatgccatggcttgactaccttttcatcaagaaccctctcagaagcttcttgacggggggatcgaccggggctgtggctcgctttgctcgcgcaagactagacgaacgattgaagcagaaaagcacaccagtggccaagacacaccaagactttctcgatcattttctgaaagcgaaagacgagcatccgactattgtagatgacaaccaagtcctctcatatacgatcagcaatatgaatgctggctccgacacaacggcgatatctctccgagcaatactttattacaccctcaagaacccgccagtaagtataaagctgcaccaagagctcaccattgccttgaaagaaaaccggatctcggtacctgtctcatggaagcaaagccaagagcaactcccttacctcgatgccgtgattaaagaagcattacgtcttcacccggccgtgggattgatgcttgagcgagttgtgcccgccgaaggactccagcttcctgacggcggcccattcctaccggccgggacgatagttggtgcgaatccgtggatagtacatcgtcatcgggtctttggggaggatgtggagtcgtttgttccggaacggtggctcaaaatggataccgagtccgaggccaatttcctggacagaaagcagaagatgcttcgtgcgacgttcactttcggagctggaccgaggacctgcattggtaagaatatcagtctgctggagatttataagctgattccatcgctgtttctgagatacaaggtaagagtatggttccagaaacgagatttgactctaaccggggcttttgcagattgaattcaatgatcctagtgcagaatgggagattgttaatgcgtggtttgtgaggcagaagaatatggatgtgaggttgtcctgtaactgaggctatagtagtatcatgaagttggacagcggcgaccaggggaaggactcgaaagagcgactcactctctattttatctagatccaaatgttttgttttgcagagaatggctactgagactataatagctgaagctaccttgtcaggattggagagctgtcagtagaagaagactgaagaagaccgttctcggaaggtaccacaacgtgcctttgtcctatagttccggtatagtagctgacgaacaagacattgcctagcacacaatgagacaagttaatacaagcacaaggagtagcagaggaataaagaatgctgtttgcttacaggatatttctttgtctgacatctaaagaacagtgggatatctaatatgtgccctataggaatgactccgggccattctatcttgatgtctgtcttctaacccggtctttcctgaatgaaacaagtatagccagaatattaagaaagcatgaagcctttgaatgttccttcccgtcttgcatccaattgtgccttcctaattcgaacacagaacgcatctgttctacgcgggtactccaaataaaatgttccgttttgttcttcttcttcttcttcttcttttcctctccccatcctgctacttttttcgttccatcatggagacaaccaaagtcattgggcctagcggccttgctccaattactctgcagcgattggcagagattcgcatcaccactgaggtcatctacaagatgatcaccaacagcaacatgatcagtctggaggagagtgcccatgctcctattgatgtccgtaacaaggctcgtgctgatcgcctcgctggcgtgcacacggtctcagcttccctgaccactcgtcgttttacccagatgggcttcaaggagcctaagctgtatgatgcctcgaaggatattgagctggccatgcaggccaaaaaggtatgtctcactcttcccaatgcccccaatgcccccatttcccctcatccattcctatccccgcccactacatgttatggtcttcttcattaagtcgcttccattctctcttcgtgttttgtccccgcgacttgatccccatttcttatcaacactcatctctcatctctcttcgttactcccatctcacactggtctttcataggacgagaaagctgctacttcccctgatgccgctcaggagactgccactcctcgtgcccctgcttcgtgtgcccccgccaaggagacttctggcattgatccgcgtgctaagccatttgttcctgctgccaaccctgctggatccaaggacaaagctggtgaatgcagggatacagacaacgactccaccgctggctccaaagcatcccagaaggccgagtccgtcgcggatgagtctactgactcttccaagaaacccagaggtgttactgccccagctgacttcatgaagcaagtccgtttgctccacctgcagaagcagatggcacccaaggttgtgcctaccggacctcctcgtcggatcgttttcggagatcttcctgactgggccaacgtctccagcatccttcagctcgtctacggcggtgctatcgagcgcgcttggagtgaggatggccacgtcgtcgtgcagtttgttgagcaagacgactgcgttaaataccatgagaaccactctgatggaatcaagttgaaggatggtgatgacgacgtcactatctctgttaccatgcccgaggagggcctgaaggacaataacgagctttcgaagcgtgtcgaagatggtgcttcccgcatcgtttgcctctctggcctttcccccggcttccagactagcgacaacgagaacatcttgggtattgccgctgaccctgcctggggtgccaagagcttcgaacgcatcatgatcaagcaagctgaggtaagtttgcagtagttctatgttttgagtcttactaaattttctttctttcaagtctggcattgacatccaggtttccttctatgatctccatgacggttgggagttcttgcagaccatcaaggagggcgcgtatgactgcatcgccagctttgaaattgatccgtaggtttccggtttgcactttcactctttctttactaactggtctactagatgcgctctcgcccagggtttccacttcatggatgagcccaacctgatgttctctggcattctcgccgttgactagggtatggaatttatccatcagcaaccgcggccgcgttgatagccatcatggcttggatgaaagtggaggggatacaaaggaaatttcggaattgagatcttgcaatttgctttcgatgggttttcagttagtgattcttcctcttgctaggacataattaatgaaacaattaaattcgatcaacccttggaacatataccgtatatagtagctgctacagtaacaaccttaccgtacaacctagatcttacactcgcacaaccgtgacgaaagaagcataatggcacataatatttaagcctgctaattggccgctttaaattaaattagtcataaagtatatcggcatttgcagtgcccctcctgctcttttcatattagtgcggatgagattcgacagcgcggaagagggccagtggtcgaatggagtcgaatgtggagttttcaggatttagtgcgaattgtagcgccggggatgtcgaaccgatgtggatagctttgaggtctaatttttagtttttgaattgcgttacttagtattagtatacgaaggatagtacaatgtacattgtacgctttgccctaaatgccatatgcagtatgacctcgcctagttataggaccgtgacacaatactacacttcatattacctatatcgtacagtctcaacttgcaatagaatgaaatatccataattatacaactagctcgtattattggcccccaaagtacagagtccaaagcacatttaccaaatttcccctggaagcgaacacgggctaactatatcatcgtgcaacatcatgcatacatactatgatatcaagcctcggcaatgcttcttgattctttatcgccacaggcgacctaatttaccttttatgacgcatttacaaagtacatcttcaacacttgacatcacacatcaatgaccccttattacattaggtattctacattacatccgccccacagcccgaaataacaattcatgcccactagaaataaagtcctcgaatcgggaattatccttctgtcaaagagaaagcgacagaaaagaaaagaaacgaaaaaacccacgatggagtccgcgggtgaagtcccgaaccccggcacgctaggaattgacaggatcggccccgtttatatgtctttgtttttccgacgatctctaggggttagcgagagtagtcacgatcaaaacggaaacaatagtaagattaactacggagtaactaaaacaattaactaccatataccgaaaagagaagccgatcgaaaaccacggcaattggcccaagcccgagtccaagcccaagtcccatattatattgcacgcacggctaagtactttgtacatacagcataagtaccaggacaacaatgcgattctttaagcccctgacaagtccctgatcctggtatgggaggctctagaagtagaagtacatagttatacatatgtgcctagtaatgaactaactaatacaaaccggtactttggctttccccattcatccatcccgtataagccgaagcgaaggcgaacaaagaacaaaaagaaagccaccaaaaaaaaaacaaataaaagcccctgatcaagtaatggaaatgtcagaatcgcactagataactaattcccacatccgagatcttcatactagtacggagcacggcggatggcgacggcgacggcgacggcggacggatatggagcacctagacgaaagatggcactcgccttgccgtgaaggacagggacccgcgatcgacggatcggagggattggccgggttgtggataggtttcttttcttagccttagcatggtctggctgtgttgactagcgggttggatggagtatggcggactactacgagtcatgttctgggtcaatatccagaccaagaatagatgaagaggctagaatggtctgaatggtttggaattggataggttgcgagtatactatctactagcatatgtatgcagcgataacggcgagtcagtcattacactagaggttggactatgttggatatcaataggcgaggatggaccatggcgttgctcgggatttggaataggaaggatgaaagtaggggatttgcttgaggtgtttgataataatgcagaggataatacctgattcctggataaagcattgaaagtagaaaacattcagactcaattcaacctcgacttttatagtaatatctagatctaaatcccgatgttttgactctcacggcatggatagctccacacaacatatagatattatagccccaagaaccaagcttggaaagtgtaaagtgaaagtgtagacaagaaaaggacaggaacccagatggaagatatgtaaggagagaacatcaaaacgacaacagacctcccacgctgaacagaggtatcttaataaagacgaagaccgacccacgcaaaaacaagacagacaaattgacctcccaacgaaaccacccgaaaccaaaaaaaaaaaaaagaaaatcacttccgtcgcaacggcaacgcaccatccccctccttcctcatccaaggataccaaacattagtatactgcctaacgccatacttcggcgtagcaccatgcgccgccgaggccccctcacgcaagaactcgccgtcccgcatgcgccgctgctcccgcagcgtcggacacttcttctccttgataaagcggtagaacttgcactggatgccctggaagccgctgcgctggcgatcatggaactggcgattgaaggcagcgcggacctccttccactcctgcgacaggtcgacgcggtggtaccagatgaagtacatttcctcctcctcgtactttggccgcggcggccggcggcggtcgccgttggtcgaggaggcgctggagacgctggagtagcgctcgcgggagtggtaggggtttggcgaggggggctcggagagcgagctttgatttgtgctcgtgctggcgcggttggggtccgcgctggcgctggcgctggcggtcgaggaccggtaggtgaagaacatttggtgggaccgggaggggattacggtcgaggtgctggatagcgcgcctgggctggagttgtggtagctccggctgtagcggtagtctgggctggcgggcaggaagcttggtgagggctggtgagaatggtagctgtggcggtgggctgggattgaggcgtgctgggagcgtggagagatgtctccgtcgcctgggttcagcagggcgtcgattttcattttgctttggcgtgcggcgggcagtgttgcgtatgattctgcgtgtgccattttggaatatggaattgggccagtacgtagattttggacgggatttatagagaccaagctttgaatcctccccagaaatgctcagaccaggtctgatagtagaagtggggatatagaggtctatatcagagagccaatggacgattgggaagtacagaaagtaaggaagtatagtatgcgcttggggtaacgggcaaggtttatagatctctcgaaaaagaaaagaagatcagcccgccgtcttaaaggaaaaaaggacgcgaaaagatcgaaaaatagttctcgcagcgttgggtgcactggaccgactgcctgggtcttggttgtgttcctttggccccccctgtatagctgtgtaccgcggatacacaaggctcctggggctaacaggggtctgttatgaggtttggttccacccccagacattgaataatataataataatataggaatataggaatataggaaaataaaatacaaatacaatataataatatataatataataaatatatatatatatatataatataatataaaacattaatcggtgaaccggactgcgactccgttagtggagagaattattttattaattctatatcttttgaagatgtggcaattcggtctactccgattccttaacctttttcgaatccttctttctttgtagagaagtgatatgggttccaaggttggagcttctttaacgggacgatctttctaatttcttttttctgtattgtatatacagcatacatacatatgtgtatgcacatactccgtatgcgtaaaaaaaaggagggccacgcggtaaattcattttacctttagccttttgcaatcttagcgccaaggcgaggtgatgaatgacaaatcgtatatcaaaaagcagttgagaacatcgacgtaatgagaccgatatccaagtcagagagaatcattgctggtctttgggaccctgctgcatgagcgcttaggtgagaagctcgattgagcacctatcagataatgtagaaataaaaaaagaagtgaagaataggaatctcgtgaatttcaattcaatttctgctttagtgtcagtgtttcattctgtccaacacgactttgtccccgttgtaacttgctcatgtgagtgggtaacgggctacctgatactccgtgtcttttccccttccttattttttttttgaagtcagatgtagacacagtgcagaaatggaaaaggaaaaatgaaccaacacaaacgcgcggcgtctattggtagacgcaaagtctgttgctgcgacgtacgccatggccctgggatatcgggacgaatgagcgtgaggagctaatgcaggctcgatttggcactgccaacacatctgtctttcaaggcgcactatgaggtaagagagatccttgaagaccgtggcacagttctgctctatcctcttcaggctgacaatagtatgttgtacttgccaatacacgactactatatactacatatacttacctacaatctaactatactcttattctctcgggggagccgacaaagcggatttcctgcgcagtcaacttgcatgtatatcaaatccgtgacgatacatgtcttagcactgatcctgatgttactcgcgtgataataattttcctctgcgccattttccctcgatctgcgccttgaccaggccgatcgtcagtcatctgcagccgccaacggtttcctttgattttcttcacggtttaaccgttacgattctatttgaaacggaattaatataaaaatattaatctcaaggaatacagttgagtctattctcattctcatctcacctcatatcaatagaccgtatcatgtatatcactcttctaattagatccacgcaatctcctccaattaccagaaagaaaaaaaaagaaggaatagaaaagacgttctgatcgtatttctgcggcgcagtcaacttgcgcaagcgtgaaatccatcctcaattagggcaacccatcggccacctctgtatggcccgttgcttccgagaaccccccttcgcaagccccaagcctctcactggtaatcctagtccctgaagcccccaattccgtgcagatcggatcaacatggctccccccgggggctaaaaccagccttttgcccctccccactctgttttctttgtctgccgctctccactcgggacacttttggcgttcatcagtcgcgtagccgcaggcagattcggtcacgtgagggctagtgtaatatatgtttccctttcgtctgtacgtgtattgtatttgtatcttcattcgtatcttttccctataattgcttcgcttcgctccgcaatccgtccatgtagcatacactaaccattagatgcagataatacgcttgaccctcccaaagatcaactccttcctgaaccaacacgtcgtggccatccatggttggcgtaattaccgagtttaattatcgtcacatttgcgcgagtcatgccgtgcatattgcatgcccatcctgctccaacggttaacgtaaaaagaaaagaaaaagaaatgaaaatattggacgatattcgctcattaattttgaaattaatttcagaacgtgggcagattggtccaaaattcatgtatatcgatccaatcaccgtccccagtcgcttaacgtctgatttatttccttctttttccgtttcttttccgctttgtctgagccgcgtagatcggtgagatgtgtcgaaccctcccctttttttttgtacgtttttgtactttttctttgtttgcgcaatcctcagctcgaatcggcaggctcgaattccaaatttctcgttccccaggcctcttctgcagctcaaggtagacgtcagcagccaaggacgctatgtcctgttactagacgttagcgatagccgccgcctgccccgctgcagcacgcaattaattgagtcatatcggattttatagttatgttgcgacggaggatacctacggagtactcttaactccgatagatcgttacgggcattgtttgggggccgacctcgatctagaatctcattttaccagagtagatctggactcttcttccttcttcttcctattattcctgcctccgtattcgaaacgggctggtcccgtcgacagggggggtggaaatgactcgtttgaatgcgcaaatttccgaaaactgcatctcggatactacatggtagggatatcaggatccagcatgcccggcgaagatgcgcagtcactgcgcaacaacagtcgggaaacccacagtttcaagcgggcacagccgttgcctaacggagacgaaagaggggaatagattcgcttctcccccacaatgggccagacaaaaggttcgtctgtatccgtaaatccattatccatctgtcagtacctccgaatccgaactccggcaatcccccctgacggatgtcataaccggttggcctggattggctgtatacttccgagaagattccaaatagttcctagaaccttgagccttggagccttggcctttcgaaaccttctcccttccatagatcgagcttgaggctcgtttctagcgaacttgggatcggagtcgatcgtccgaacttacgccgaactgccagattgatataatactgtcttactagacgtgggcatttgcaatcgcagcatggtgcttgatttggcgtagtggagcatgcagttgtgttgtgaactggatatgttgacaacacgtcgataccaacttccaagtaaatcctgcattggcgccagaaacacctgaccgtagcctcctgcaagagaatcctggtcatcccaacgttggcagttgttggctattgggggcccgctaaaggcgcagaagccgggcgccagttgttgcaacatccgatcatgggtccgggtaatcatctcttggctgtgatccttcaaaatcaataatcatttgtcaggaataaatagaattattaatccagacttagcttccccgtaactcctctcgggcttccgcttcggatccgactcccctatttagctatggggcctattcaggcttttggtcgatttcagccgcacggtgccaagctaggatttctggcactagccacgacagagtatgtacggagctctgttgtacggagtacgtgtaatacaggtatccaatatagacgcaagtcgtacccatattgagaggctagactacggagacgttgattacggagacgttgatgtgcactattagtgtatggagttcaacacgtatatctccgctcccaagaccccacgccattcgcactaaactagtaaacgatccataaacgatccattaaacgggggccggccgaatcctgcacggttcgatccagcgcagctcacccgcaacgagagtggacgtgatcatcttccttgttttcggacgctctcgagtctcgacagactccgctgggcatattggaagtcgtgatgctatcatcctcacacttagcaccatttatatttcattcccccgtccattagtactattggcccaggtacgaatatcctcacgaatcaaaaacggggaaaatcacccgccaagcaagcttaatatctagtagcgactagtgcctccagcttcttttcccgtatctggcctagcgcgagggaaacataggtaccgagtacggagtgctgtctgtcacctttgtctgaaggagatccgagatctgacttttcggcaagacatgaagagggtctaggtgaagtcagtttgggccccccccccccccccccagcccccccnnnnnnnnnnnnnnnnnnnnnnnnnnnnnnnnnnnnnnnnnnnnnnnnnnnnnnnnnnnnnnnnnnnnnnnnnnnnnnnnnnnnnnnnnnnnnnnnnnnnnnnnnnnnnnnnnnnnnnnnnnnnnnnnnnnnnnnnnnnnnnnnnnnnnnnnnnnnnnnnnnnnnnnnnntggcccccccccccccccccggccagacacgcgcaaaaagagagaaaaaagggcaacgagacacggattttagtaatttccgttttgacctgagcagctcaaagaattccgaattctacaaatcgtttggacgccggattccgccacacttctggaatcgatcgacgcgcaaattcaaagaaatgataagcgaagcagcgaatggggatccccggccgaaaaggcaagaaggatacggagctagctggttatgggtggctcgctgtatttggtattttcattacgtttgttacgctcgctactgcttactgaggattatgtatccagtgcccagacgctaatacacatcggggcaatgatgttatattaccttggcaatatcaaccagcttgaactgaactctttatattgacattcagctgcgtggatccccaagtcatgatatcaacacttgagctggtaggaccgatatccacaagaaccctctattgaattctatactgtggacaggaatacgacatgatattgcctgatgtcttatccctcgaaatgctacaggattgggtatttacttcccttgtcgatcttcttcagtgccaggcgatgtgggtatacttcggtttcgcgtatggtttccccggtggttatcaagatagagtatataaatatatattgtgcccgaagtagggctatcatccggcgctattgtcatgttactatctaaagccaagcatcgcttattcctggtggagtgttgagaagtacgtataagcactagtcacacgtggttcgtgacgaactggcggaggctgtgcttattctcatgtcagatgatctatttcttttgttctccgtcttggctgttattgttctaatctgattgtataggggtttaggtttccagttggataatttatccgagatccatacacatatgtagtcatggttacacggcataccatataggtacgatatactcgtacgcagcagcatattatttccactacgactcttcaaacgatgtgtccgtgcagtactccgtactcgtacgagcacacacctgatatacatcatacagcccacctaaacacactaaccagcagatcttaattagataggcccacaagaccccggctaaacacacccgtctcggctcgcggtttgatagggcgtggatgcgagcttcccccgggtatatgcggagaacaaagttattgtatggatctggcctatcgtctcctttccggaagatcactcgtatacctgctccgtaacgcgcattgtaatggtcattgtggagacggactggatcctgccgaatatcagaatttcgaaatttcgaaatttccactatgggttccgatcagccctggcggccggatctgacatgggagatctgttacacggcggccgatcgaaggatatgcggtgggatgatgaggcgtcgtcggggatacgatgggaaagcatatgggctaggggaagtgggtttgcaatgcagggttaggaatgtggttggatgtgatgtgggttgggaagaaggggtggccgggatgtgcgtgcgtgtgtgtggaggttgtgtatgagatgtgatatggaggatccttcaaaaggaaatatataatactaaaaaagacagtgaaaaggacaagcccaacagtcacccagttggaattatcgccattcgtgaacagcaatagcatcaatggcatcaccgctccgacttgtgatcattagcgaccggtgatcagtccagcgttgccattgccattcatgttgtatacagcccgaagcagtcaacagtcactctgtaaatatcggtgaaaacaccgctcaataccgcacgtgcgtattacttcctgccccagccacaccaatcagccctcgggcattgacgacaatggaagcactaatgccatcagcacaccgaagccagagacccgggtcattagctccgggatcgggccttctggcgtgagctatttctgcactccgtttcggcgatagattgactttgcgccgttggatgttggaattagatctcgggacattaatgttgtcgcctcgggggtttgttgcctggatagtgctggatagtgagcgatgagtggttcagataggagtgggggcatgatttggtgtgtagcatctcttgagttgaggtcgtatttgcgtgatttcttttagcgacatcagacactgtctgcatcagggactatacctagttgagtaggtgattagtcgatagtgtttcttcatggatttctccgaaatctggatcagcaataaccccctcaagcttgaagtataatcaccaaagtacccgagtcccgagtatagcgtatccattctgctccatcctcgaatattattagcaaagtataatcgggcactatcgtatagtagacttggcatcttcagatgttcagtaagtcttcaccaccaagacagatgtgacgaattgtttccgacgttcccccgctgcaagagattcgagcccaatcaatagcggatactcgagactgcccgagcacaggaacctgacgaaatcgcacatcttgactcagtttggcaacagcctttgttcgatggttaatgctcctattggaccataacagaccggcttggataaagcggattctcgtcggtgactttggcctcatccattctccagtcggggcgttgcacggttgtttcgtgtttgagacgtgcagacggagtacagcgaggacatatcccaactccaaggggctgaaggattgggaatgatccgagctttgtattttactattttggtaattgcgttactgtaagattcattcgtaaattaccgctagccctttctttttcttcgtttctttcctttagagcctcacctcctcgcatcgactcccgcttattatatccgcccaacgagaattcagccattaaattactgcaaatgaaggccaaccatggaactagaccgagctatcctctagttgcatatccacacatcggggtagccgaactgaatgatatcaaggtgggttacggccacgtaggagttattcttcagtcgatcttttgggaaaatccaaacgtgaagattacagacatacggagtacatcgtgcacgggatctgcccggtttcatgctaaattctatcttgatcttcgcgactttgcatgtgttaggccgtgtgtccgggtagaaatggggctatttctgcaggatgtagtggggttggtagccttgtcttgcctattttgatcagtcgagatatctatccagccctgcgcctctaaaggctattatatatcagcgccgttggattgtgccattgcaatatatcagctggatcctatttgtcgagctgttgtacatgttggatagcgctgataccgacacctagagcgctaccctagtgaccgctataggatagatctcctgcatgcacaattcactatgtcgcatgcaggccgactgattcgtaccgtgtatgatctcggctttcggagtggactaaacaccggtgacggagtccatgagggagtaactaactatacggggaatgttgtatacggagtccggagtccaaataagggatcaccaaatcgtcatagaccaacgcgatgaaccactgtaaaatagattctccgtccaatagactaaatcgctgccaactatcaagtaccaagacagagatcgacacaccgacaggtatatttgaacacatgaccaacagcactagttagcgcagacagcaatagacatctctcatcgaatcaaccaacaccacaccaacaccaacaacacaacatacaccactgctatgttgtatatacccgccgtgctcaaatgacttcatcatatctaccccgcaatacatccccggctccctaaatctcatcacatccaaaagcaccgaaaacccacgtggcacgataactgactccttcctatctcgacataagacaagcgaaagccgcatcctcaacgacccccgacccttctggttggttccggggtagatcggagaatatgagcccacacacccttcatccttgactgcgtttttaaaaattttaacttccattgcctgatcggtttttttttcacggagatcctccgactacactttcttgtcttgtctggtctggtcttactagtcggttggcgccatttgagatatttttgtcccgttgtttttttcgcgggttggttggagaggggacgatcgggctcgggtgaaacgaaacgaaacgagacgagacaagacagaacggggccatcggcaggagggtatggaattggaattggaaaatggatatggacatcggtggggaaaagatggcttggattcaggttggatgtgggttttcggagctacggggttgccaacggcttggttggtatgtatgcgtccctacacggcctgggacgagatggatggaaaattggaaattggcaattgggatggtgcagtaaggagtgcacggagtagattgtagttttcgtctcgggtttcgatttccatgttggatcgttggtggggggaggggcttgcttttgatcctgattgtttacaacatacgccccaggaatgagggatatatctctttatcccatgagacgggagtgtatcgatatggatgattcatgcaccaggaggattctcgtgtagactccaggtaactctacgattgtctaatctaggtatcgtataccgagagtatcgatgcagccctcgttggcgtattcatacttcatataccttcctcttttagtccagtgtgcgtagcatgtggatatacctgggagtctcaatattagtcctggccgtctttttctcctgccgcgggatgcccaaggtatcttttatgtaattgatcaggtcttggctcttagcagctagctacgacaagtgaaaaagtagcacgaggcttgttgattcgatagaaatatgaagtaggtattcggagtaaaataaagcaaacgctcgatcaggacgtggaacaaaacaagatagagggacaacggcagtgtcgcatagcgggcagatcagtagtcttcatctgaatctacgtgctcgcggtaacgagacatgtacccagacccgccatcctcgctcgctgaatcgtcaaagtcgaaatcatcctcatcggacgacgcttcttcatcggggtaatcgttggctgggttgttttcggctgtagatggtcagtggaggtctatgaggggacgaaaacgaaagcggacaaagagaaggcaaagaagggagaaacatcacacaccattagagtccgcatcctcgctatcccactcctcctcgtcattctcaataaaatcctcccagatctcctcgtcctcggccgtgatgacaatgacacccactccaggctgagacttggcgagatccttttgctgctggtcggactcgaattcagcgagcggattcttcagcatctcctcttctgatagcggacggcgcacgtaaacgtcgtagacatagtcgtcctcgtcatcctcctccacagcctgttcagtctgcggcggtggtgtaaccgcgactctgggttccttgggctgccggggctggtgtttcaacggaggcttaggagccgtgctaaaagcaggctgtacatatgcaggcggaggggccggtttcacatcgatatccatgccataatcctgctcagcctcccgctcaagctccaacgcaatctgctcgaaatcatgagccagacgttcagactcttgctcccagctcctgtgctgtgtctgagcggatttctccaacgtctcagacagacgctgcttcgcagccgagacagcaccctgacgctcctcgcgccaccgtttctcagcctggttaacaacaggccgtttgcgcggtttaaccggcgacgggggcgtattatcctggacaagttccttaggctttagcgcgagagcctgcgcctccgccaccatatccgaaaccatagacgccttgcgcgagtgcgcattgcgctgcagctgctcaaccagaacagccacacccggcgcaggaccaccagtgcgccgcttctggattcccccaggcgaacttctcagcgagtcgagattcgagcgcgagatctggaaccggcgcagggcctgcgcgcgggtcgaggatgtctcttctgatgccgggctgctgtcacgcactgcgggttcattagtggtagtagctgcagagctgccgggctggatgtcggtgaaaggagaaggacccccgtagacggcacgcttgtgcttttcctccgcttctttgcggacggctgcgatgcgctgcgcttcgcggaattcggctcccggggacgtggcccgcactgtgggcacgcccgtcgaggatgcgggcgcgcgccggtttacatggagactgcttactgagcgcggggcgcgcaagagccgttgcgcggctggtgttgctgggcttgcgggttcatctgcactcccatctgcactcttcgcgctggctttcagagtgactctgtggaagacgaagtcggtgaagcgccgcttggtttggtggagtgcggattgaatgactgggtaggttagtgttggtggtcaatgtggcgggcgaggtttgatctagggaccgtttccgtgatattatgtatcttttggatgggtctacatcgcggggaaaaaacacgggaattgttcgtacatagggtttcgacgggctcttcctcgcgccgacgcttgatgttgatttgctcgggtggaagcgccatgatgtcaagttggcatgtattttgcgatgtggattgtggggagagaaggttgaagcattcagtttgatgtgtctgatctttaccgcatttggtctgaatgatcacatgatctgaatatagatgtcacgagtccggacaccagaactaagagggcggagtactgaattgttatatcagaatcaatcaagatcagcccctaatctggccaagatgatattagagccgttacaattaagatacaactactccatacaatgtctttaattagccgcaaactatagaactgcggtgacgatctacgactcttccaattgactggtgcattctgttctcatgtataattgcttcgcttcgctccgcaataatgtgcctgatctattatagatagatgatcatttacatttctaactaatgttccaagttgggtagatggccatttttctgctaataggaccaaagtcccaagtggtcactatgcaatgcgatataatcgccgccacgactcgtccctctccatggtcatcatccagtgaaacatgcgacgtactcacagccccaagcaaaataaagagatagaaaaagttcaaagatagaaagaaggaagagactcagggccaactagcaatacaaggtggtaagacaagatggtatgcaaaaggattaataggggaatatagaaatcgcgaacggaatatgtccggacgaagagtggaaatccaaaaagccaaagaaaagtaagaaagtaaagaaaagacaaggggtgaaagtgaaagtgaatagcgaagagtcagaaaggtaaaaagattatgaccaatacaagaaagaatcagatcaaatggggggaggaaagacatgacaatcagaagggactatatgtaagaagagagaataaagtggcattagggtcaccgaggacaagagtcgaaggttgcatcctcgagtgcgcatataattatttggctccgatctcctcttcagcccagccgggcagcgagttttcgttttgaatagccagaccaaatcctgagtggttcagtccaccgagggcagagaagctggagaagctgctctgaggctggtgggcacctgtgcgggggtggggttgaccagagacaggtccgaagggctcctgggagaatgagggcaggctgacagcccgtgagtgcgaagcacggggcacgctcagactgctggtgcttgcgtggtggccgtgtcccgatccatttgccacactcaggtagctgttggaggacttgtgctggtgcatagactggtccatgtgtccattcatgtcgccgttgctgacgctgttatacattgactgctgtgattgtgcctgcgcctgtagaccagagagggccatatggtcgtggagatggttctcctgctcctgggcctgatgagcagacatctggttcaggtacatcgtcaacgggttgcttgagccgatattcaggaccccagaaggagaggtcacgttctgcagcgggtggcgatgctgtccgttatgcgacccagttgatcccgatgccggggaaagggcagggcgagtcggacttgactgggagccagactggctgaggttctgctggaatccgttgagaacggacggtggtgactggccttccatgcctccgttgcggttctgtccattttggttgtttccggcttgacgcggtgggtttccgcagcggtcctttccaaagttgatcttgaaccgccggtagtcctcccgattacgcattccctcaatagccttgatggcattggcgatattcgtgaagttgacaaaggcacaactcttctcgcgcagcgtgttcaccaactcgatctcaccatactccgagaagtcctggcgaaggcgttcctccgaccaggcctcgtccaagttaccaacatagacattgcgtgacgcaccgccgctgactgctaacgcaatggcgggcgggagagggccggagtgtttgccccatccaatcttcaggcgccggttgtggatcattagtccctgcaggttgctcagggcgtaaaaggaggcggccgaagtgggatcgatgaatgtaacgaagcaaatgtgcttatctgggatataccgaacatggtgtagcaagcctccgcgaacgacattgcagatctcttcgatcgttgtttcggggtgaatgtttccgaggtaaatggtgcggttgccgagattgttaacaccgcctgctgtcgtcgccacggcggccgcggcaacagactgttgtgcaagggcattagaaatcagatcacgatccgccgtgttcagcacatgtgcatacccgggtgcgatgccgaggaactgggcagcattttgctgctgagtcttggatacatacgcacaacggtccttgccgtagaacacccgctttggcgcttgccattgcggctcctgggggagctgggtgacagacttcatggcattactgatcgataggaaatggacgaatccaatcgccttctccttgacgatcttgacggtgtcaatgggcccaaatttgcccagatcctcccgcagatcctcctcggatgtttcctcgggcaaatttccaagataaacattacgcgacgcgcccgactgttgaacagccagggcaactgaggtgggaacctgcgacggcttaccccagccgaccttgatatcatttcccttgatggccaacttcttcaagatggcatcggaatggaaatgagtggctgagctgctatccaaaaaggagatgaaagcgcagtttttatcagggagcaggcgcaccgactcaatctgaccgctacgcacgtggtttaaaatctcctcggcagatgtttcagccgggatgtttccaagatacacggtgcgactggtccccgacagcatgcccggggccacggacgcttgggggctgccgagacccccattgcccatcccaagaccattaatcggcgattgcggccccatcatctgggagatacccataccgtcaggtgacatcatgccatacaaaccatggttctgcattccttgcgtagggctgtggatatggttctggttgttttgggagtgtccattgccattggcttgtgagaagccaccgaaattggtaaactgcggcgaagcaaaagccgagggcgttcctggttggaagggactgcctaccagcagctgggaagggagcaggggggtgtagttcatatcgaagccggaagccatatcggagtgttggccggcggcagtgtttatagcggggatattggcgcgacgcgtattccggtccgagaatccttggatatgattggggtggttgttgttgtacgctccgtgagaaaagccagtgtcaccgttcagcgcgtatttagacccaggatgaattagacgcgaattgttcgggatgctcgatacatccgaggcttgcatggcgagagaaatccaacacttgtcctaagacaagaacctagtcttaatcagggggatgagaggccctgactaccagactgagctctgatggggggggggagaaagggaaaaaaaataaagggaggattatcagatcaccattcaggagatgggtccccacagctaagatcacagggaaaaatagggaggattcgggtggagaagaagggaataatatcaaaaaaaaaagaagaagatctttttttcaaatggagacgtgtctaaatagaagttcacaagtcaattggaatgtttttattcactcagggttgaaattggggattggggaatggggaagacaaacctgtcctttctttgtatgtagagaatgccagttatatgtatatcccccacgcagaagagaaagagaaggagaatgcaaatgcaaaactacaaagtcattagcttaaagaggttaagaaaagggaaaatggcctgaagaaaaaaaaaagggggtcagactgggggaatcggggaagagtttacagttgacaggcgactagttccttttagaaaaaaatataaaataatccttaaagccgaaaagaagcgagcagcgagaaacggaaataaaagggttaaaagagcgtcgagaaaaggaatgaaaggtaaggacgtgaatccaggcaaggtatgggagaaaacattaaaagggggagaataggagtgggttaaggggggcggactaacttcaggaagttctgatttatatgcagttaccctcaattggattgtattgatatcgaatagtacaatataaaaagaatcgaatcgaatataaactaataaaaacaaacttggtttccccaaccttgttcccgtggctctgcagaactggatcaggtcccaatacccctgacaggatcaatatagaatataactaaattatatacatctgcaatactcagggacatcttttaaatcctcttcttaatttctgctggacaatagcatgagtcctgtgacaccgtgacaccctttatatctatccacgactgcaatatcccgtgcgaagaacatatcggggccttgatgcctcatttagaccgcttttagatatatttgcaccccatggatatgaagctttggcgctatacaaattgattatctctattagtctaggtgggttattctaaatcctacgattggttcatttaaatctactcaattgttttcgtacatgacagagagtgcaaatcacctagaaaaatagaatgtatgaatctgtatggtgccaaaagcctcattttgcctcatgctgacagattactaagctgtcatttttctgccgggccgaattcaggcatcaaggcctctatccctagcttatagatgccgaagaaactccgggccaatctatactattcacatatttagcccagcaaaggtgcattttcctattctgaagcgaaacagccatctagaccttttatgttgagtttgatcggcactcaataaaccctcgtagagttggccttacaattagtctctgaatatcaaccaattacgttggagagtacatagctttttcttagaacccctaactatcgttgcaactcttgtagccttgtattctccagtggtgtagtctcttttcctgtcaattcttggacctgttaaggagacgttcctcacgttgagctaatatcaggcaaagagttcccatattctgtgcgttgctgatatcttgatgatctgaaattgaagtagatagttacttaaagcaatgtcgtcattatacttcatgactcacggcattatcctcaataatcagattgaacatctaacatctaatacctatacttcataccaatagttagttgtacacccgaaagacagagatatagatcgccgcctcaggcatcagtggggatcccgcatctatcggaaatttacccctccgcaatgtgcgattcctcccttggacaacttgcaattgggaagagataagagttccattctttgcgttatcaggtgcgtttgctttcacattctaatccgtcctgcatctcgggattctttcagcccggggtatgactcacagattagacctatattaattatctctcccacagaactctcccgcaactgcaaagaccagacccaacgccatggcgtcaaccagcatctacatcgatgaagacgtcggtaaagacgagtcctcagccaccggcaccgagaccgccccctacaagaccctcgtccacgcctacgtggaacacccccccaccaccgaaggcatccagtacctcacgcgcaagtccctgaccgacgccgccggtgaggatgtcgaccccgcagccaaattggagtggaagcccgctaccaagtcggccatgaagaaggccaacaacctctgggagcagcgcaagaagaaggccgccaaggaacacgaattggccatccgcgagaaggccgaggccgacaagcgccagaaggtccttgaggacgccaagaaggtcgtgatcaaggaggacacctcgctgcccaagcccgtgcgcattcgtctggacgtcaccgacccggccatcgtcaagctgcgcaccgccgagtccgatgagcccggcacccgagtccgcgttctgggccgagttcaccgtgcccgcgcccagaaggatgtcgttttcatcactctcaccgacggctatggatacctgcagtgcgtcctgaccggtgacctggtcaagacctacgacatcatgaccctcaccctcgaaacctccatgtccatccacggtgagatgcgcgccgtgccccccaagcagcatgcgcccaacgaccgcgagctgcacgccgacttcttcgagatcatcggcaaggccgctggcgacaaggaggccattaccacgcgtgtggcgccggacgctgacccgcagactctctacgacaaccgccacttggtgctgcgcggtgagacctcttcctccgtgatgaaggtgcgcgccgctaccctgcgtgccttccgcaaggctttcgaggagaaccgcatgctggaagtgacccctcccgccatggtgcagacccaggtcgagggcggcagcactttgttcggattcgactactacggcgagaacgcctacctgacccaatcctcgcagctgtacctggagacctgtctcccctccctgggagatgtatactgtgtgtgcccgtctttccgtgccgagaagtcgttgacccgccgccacctgtcggagtacacgcacatcgaagccgagttggacttcatcaccttcactgatctgcttgaccacctcgaggatgtgatctgccgcgtgattgattacacccttgctgagcccgagatcgccgggtatatcaagcagctcaacccggacttcaaggtcccgtcccgtccgttccgccgcatgaagtacgacgatgctatccagtggctgatcgagcacgaaatccccaacgaggagggccagccccacaagttcggtgacgatattgctgaggctgcggagcgtcgcatgaccgatatcatcaaccagcccatcttcctgacccacttccccgccgatatcaaggctttctacatgaagaaggatcccgaggaccgccgtgtcaccgagagtgtcgacgtgctcatgcccggtgtcggcgagattgtcggaggcagtatgagaatggacaactgggatgagctgatggccgcctacaagcacgagggcatggacccctccccttactactggtacactgaccagcgcaagtaagtgatgtgtcacatttttcctatttatctcaatgctaacattacaataggtatggtacctcccctcacggtggctacggactcggtctcgagcgtttcttggcctggctgtgcgctcgttataccgtccgtgactgctcactgtatccccggtacaccggccgttgcactccttagatatgtcaaaaaagttataaagcatgatcatgataggtacaggaatgtggcatgggtgctacaatggacgaataagattttccttcaaatgaattaaaacgattcagtgtcttatgttaagtacccaggtacaaagtacctatgtagattttgcttgtcccttgaagaacacggatacgaacctaggcctgccatatcccgcaagactcttcaaactgatgcccactgacactccacaccacagcttcgaacaacaccaagtcccggaccttggatactctctgaacacatgtacagtcaagtccacccagcagtcttcgacattaggatcccgcagaatatagtccacacccagggatccaaatccattcccaaaatgttgccgttgccgttaccatccagcccaagaccctggcacctggaattcaaaacccgaccaagacgggaggggagcatgcatgcgcacatagcctcaaaccgagtcccgtctgcatagaagtttagctagattccaaacacggctgttcacgtgcggcgtctctccatcgcccctggccggtagatttgatttcatgttggtgttggttttagtgttggtattggttggatttagctcccagccacaacaactaaagccatagatggaaccgatcgtccggtctgatgatgtgcgagtcagggttgcgatcagtagggaacgggtatgttacggcattgccgtgatcgaggatggggatatggatgttgtcattttcgtatagaaaaagattggaatcgagatcgcgttggatgaagtctggtcacgggcacgggggatcgattcggtgtggtgtcgtcctgctgttgtcgtttcgggtggcgggaaacctctgtctgtcaccttctttcatcatctcccacaacgggcatgggttagttacgggctttttttttcagaaaaatgggcagagatctgagattcgtgtgaaggagtaagagggagtgagagagaaagtgagatggtctcagtctctctccgtctacaggaaccagagacggacagtgcgatgatgaatctgaagtcgatctctgaccagcctcttttcaaaaaaaaaaaaaagaccagcaaactctgagctacatctctagcataggaaagagaagaggagctgtcccgcctacaggaaaagaagcgcccagcaacaaagggcgtgatccactacatcctgtgcttccattgctcgaaaccgcacggagatagaatccgtaatgcccacggggcattcccattccacttgacccccttcgagaaacggcccaagcagcccagtggatattccatttaggtatgtccttgtgagcagaggaatagaactgtgtttgtcggtatttcggaccgaatagacgccaacatcgacggtcaccccgttttcactcttttcaacacaactcatcaccacccaagagacggacgctgcttaacctcgagttccccggacagggacatatcctcgtcgcgtttaagtcttgatgtttgccttgtccccgttgtacctttgtttcattccgggtgatgtttccccgtgtacggagtggcggtgggcctgtattgggtttccgcacaccttgggttagtggctggctgtcagtctcataccgggcttggtattgatagcctgatcgtcggaggtatatagatgttgtccgtgtcgacgagatcacagctgttgtgatcagcagggaactgggtacaagtacgtacttttcttttcccttttcttgctcttggagtcagagaacacgtcgtcgttcctcgtttttccttttcccttccaataaccctaattcatgcataccccggacaatacttgtgacaaaacacaacacagacattcagctctgtatgaaaagccaccccatagaggaacatggatgtgaaaaaaaaaaaaaaaaaaaaaaaaaaaagcgtcatgagttatattgactaccactcgacttacagcatttcatttgtcttatgtcttttccaagacctaggcaaaaagaggaagaagaaggacactctcatgaatcatgattgttctcctagaagacatcaacagtaatgcacgattatgtcacccaattctcgagccgctccaagaaaccaaaaaaagacaaacaatcgccaaagccacaaaccacagcacatgttcgttctcattggtcgagtaaagtgcggcggtcaaatctcatcttggacgcgttgaagggcgaggcggatgtcctccttcgacgccccggagcgaataagcgagacaagccgagcgacagcatcgctatgagcgtcgcgcacgacagcgaccaagtcttccaggaactttcgatagtagttcagctcgatttcctgctgggagatctgctggcagcgccgaggtgagtcgatggcatgttcgctgttcaggctggtggggaggtcacgagatctcagcttttggatcaatttaagcgttgccggaagggggtttggttaacggggcggaagaagaaggaggagatgcgttcagagaagacagtgagagagagagagaggtaagagataatagaggaatggtttctttcttgcaatttgggccggacgagaaacgatgactactcactttgctgcgttctcgctgcgtgccgactcggtctggcgggctccgttgcgagctcctgggcctccttggtcgttggtagagacggctgcggtgcggtttgacatgttgatgttggactgggggccgggtatgtactgtcagggggtgatgttcctatgtgcgaagagaggtttgggaatggtctctaccgtgctcgaagctgatcaaataagggttcctggtgtccctgtgtctacctatagaatagcacaacttcttagtagttagcaaccagactactggcattttgggggagcgaaaacagatcctaatgggagaatggggcaaatggtctaagaggcgaagtatgaacatcaaggtaagaggggctgggggcacaaatcggtcggccatacgtgtttatagacaagtatcaccgcgtgggaagaagataaccttttacatagaatttgtagaaaggttgggagatgagattcgacgagtctcgagaggtcaaagggagaaaggtgggacctctaacagaaggtatttgaggggattgggcagatcgctggtggcatccaacgaatcgagaaatatagggcctggtatacttccgtgaggctctcgaggtagcctcgtgttaacattcgggatcgaatttgacaatatagcaatttcagaataatagaagaatcaaaagaattgcattgtagcagttcgattgtcaagaccttcaatcggccccggataaaactgccagccaatcgtcaagcgtgtttttctccagagagcacatcccaagtatcaatatttgggccagcctaagtccatcttccgctattattttccaccaggctcttcggcttcgaccttggttcctggtgtgtggtttgccgggaaaatgaggcgaatttagggccctagattaatattcgcctgtgtattcggatttgccgaaatctccctcgggacggatagattcttgattccaaagaggcgaatgtattcatttttgtatccgtggcgactttcgcgcttttgtccatggcagtttgtttatggagagtggtggagtgacaggcatctgtactcctgttccactgtttcagtagtgacaggagccaattgggacggctaggactcccgggtggactcgaactaacggcaagtaaactgacagcaagtgtccttggtaaagttgatgatcgccatctcatgctcgttcaaactcgtgggcctttcattctacctcgaggatagagctgtgaatactgatggacaatctgagaaacgtgtttcgtcaagttggaccagaatgatgttctgacatccctgggacccggcttctgtgtcctttcacagacacacattgaagaggtacagttctctctgtcttgtctggatgggattcaccggcagattcgtagaactgcatgctgacttgccctttctttcgtttaggaccgacccttttagcacccaatccgtttctcaacgtcaagacaagcttcgaactccctgttccgtctcctccttgtccgttgacaatcgaaccctccatatgaacatgccgtgtgttcgaccgcacctgataaagttgagcacggtcttttctcgccagacatattccacgattctgaaaatttctctcgataccacgaccccgaacgcttgaaacttggcaacatgccttaaatggcatgtgagcctgtataggcatcggttgctggctgtttacggcagaacaatggtttaatgacctgctgtacggttgtgggggttatggacgtggttgaatgggaggaccgttcaccaacactccacgatattattcagtgtggaaacatctgggtattggatcgagtaccacaactcgggggtgtgacacggaaccagcatttgatgaagagtctggtgttgggtatgatagaccaaccagcccctggctcccatgtgcttctgtgggagtgtgtagcattataccaacattttctgttattgaccacacgaacagtcatcgatgccgcagaatagcgtgtcttgaaaccgaccatctcaactgtttccgccatcacctccagggtattcgcgggatatttccggtccatatggttgatagaggctttcatgcaacggcaacggggatatgaacgaaagtaagtgattggtagtgcagtacggagcagtggcaccgtcactgctccgttctgggggttgtcgtgggtcgtttttgcacatcaaggatgcagtgtatgtggttccatgtcgattcgggtcaaggaacatgatatgatgccttttgatcttgcaagctatgacaattccgtgtctgaaggccactttcgggtcgggtgtcaacttgaacccaggctctcagcatagacactcatggtcgcggagtacagagcgcagtgatcatctgagccaggcatggtaaaggggtatcgatcggtgattcgaggccgtttcatccaggccatgtcgaaggttgctttggtgctgtcgggctttcgacgggtcgtgatgggcatcgacgttggctttgtgtgtgacgaaaacggggggtcgtgtttcccaggcacactgagactaggcaacgctcatccgctgcagtcctggagcatccgatctgtccgagtcagtcactacacagcacggtcggtaacgttggaagctggcccatttggccagctcgatgcatggtcgaggcagtctcttcctgtgatcgtgtccccgttaatatgaggctttctgtcggtgacggtatggtgatgtatatggcagagtagacatgatatgtgagtgagaagcaggtgtgacacttcggagccgagttgggctcgatccttcgacctaaccctgaaagtagacccctgtcaccagtgatgccggaacatcttctagggacaaccccgtctcgagggtagaacctgagactccctacttgtcttttctcctggcaggacacacgcagtatcaaaaggagagtccgaggtctgcagtttcctttcccaaggggaggaaagaccaactctatccttcacttgtccaattggatccacccatgatgaggaaaatagttccaggcgaggttattggggggctccaccggcgccaacattgaaacaagcgtcagacttgcgttttataatgtacagtgatctagtgaagtcgaggaactcggaattcggaccctgctccaccaatatgcgaatatgttagcatttgttgaaagttctcgtggatgttaagcctcaagagaatgtcctatgatctgtgatcgggcaaatcttggttggcccacatctcactattgaccaccaatgcagtggctggaacctcaacagtagaataacgagcaatgttcttgatattgcccttggtataggaaccgttgctgtgaagttccaaagggtcgcagtcaatccttgataggatgcatgtggcaaatgttcttagttcagccacccgtgacaagtagaaacctgctaagtagagttggtaacttgtttctttgcaggtacagggattcttattcataaggtcatccacggctcgaccaaggggaggttcattttccagggccgattagcagatatccatttacaaaaaatcgaggaaaccattctaactcgcatcttaaggtacatcgatgttgaacgagtcagtggctcataatagcaggatacttggaagccttacgtaaatcctgacgtgaatatgacacaggcagatgacctggagattcgacattgattttaccttccaagctttgttatgccatggacgtctataaccttgatcaaggcacaccgaaacgatatcctctttatcaatctacttctacgaattcggtataataagccaagctcatacctctcgggtcagacgggtaccagtcgactatagctatataaacccaatgaattcgaaaatcccatctcgtgtcatacggagttatgtacatgccaatgtatacaaataccacattccacagcccccgaaaatgcccctaacacgacacctaaccacaaccctccattcctaatgtacgcgttaaatactaataaccagcctgatccctcgttgatgataagcctccgacaaaacatctcgacaacgacaaccgacaactaacgacaacagccgacgaccaaccgacgaccagcatctatacaaatcaaaacagacaagaagaaaacaaacagcaaagaaaaccaattcaatccaaacatgcatcttcccatcctcctcctcctcagcgcctctctcgcttcagcgcaattcggcaaccaattcatcccaagcccagcgggattgaaataccccaaacccatcaacagacacccacactacgtccagaacacaaacaaagaaatcgacaactacgacaactacgactacgacgactacgactatgataacatcccaagcctccccaccccaaccccaaccccatccccatccccaacccctcgaatccacggcacattcctagtgcgcccttcgcaaacacccactgtccaagcaacagcccacggatatgggcatgtctacaaccacccaagccagggtccagacgccgagtcccgagacaatgcaccctccttccgcggtgccgacgacaacgacgactacaacgtctcgcccggcacatcgggcggcgtggctccaattgacccgctagcacctggttcccaggtcgcgcctgctccgctcttcgtcaccgcgaatcatgggaaggatgaggggaatgcgttctgttctgggcggtgctttgaggatgaggaggatgcgcagtgtgcgaagccttatgtgagttttttcttttttttttaactcttttctttctgggtatacgatggagatggatatatattgtgtgtgtatttgggtattggtttactaatgtttgttctaggctttggctatctataagccggctaaggggtgctatatgtgctgtattacttccgatttctaggattggattggatattggattcattttgtgagatggggttgtttggtgtttttataggagacggatgggatgggtgttggctgtttcgattgttgagtgttcttggtctatatctgtatcttccgccttgcttaaaatagtttatttcttttttatgtcttgttttagattgaagtaagagtagccgagacaaaagtatcagtatcgtcggtggagagacttgccctaatttcggcagacccatcagcctgaaacaaatctgtacattacacatctatacgatacaacagatcagcactagatcgttggtaggtccacaaataaataagcttgattaaagaaccagactaacattgcttaacttacgaatttacgaatcggtagagatgaatgaagatatgccaaacggtccatttggtctagataccagagatatccgcattaataaatctatattcgtgtagggagtatggaataaataaagagcaaatccatgatatcatatcgttttccacgctgaagagtcacagctcgctcggactcggaatttgaataaaaggataaagaggataggcatggggaaaataaaccgaaagagaacaaaagaaaaaggagcaatgagctccatttcatgaccgcaaacagtgtatgtatttttgttcaattcttcacgcaagtctcgacgggccggccgccaataccccgcgccatgcagataggagcagagcgtttctcatacgagatatctccccacacagcactgctggcagggaggatagagccactgtccgagaggattggaccgacgtcctcgtgcgcagagacgatgtgcgggacaaccagctcgacgcccttggtcacgctcgtaccggaaaagtacgggttgtggcgcgggggcagcgggcgggcctcgtacatgctgcccatgtagtcagaggcagtgctgctgtaggacgacgccacggtagacggggtgtttgtcaggctgggcacgtgactgtggctgtgggccagggcgggaaggctggagctgctgcgttggacggagggccgaagcatgggctcgttgccgccgtggaactgggagagatagttccaggcctcggaggatgccagggacgaggcgctccgctctaatacgggcttccattcggtggggtcaagatctgacttggcatcatgcacgtggctgtgtatccgcatggctgggattcggttgcttggcaccctggtaggggtcattggggccacgatagtgcgtggagagagggaaggagatgtaggtggtgtagtggtggaagacattgatgacatggatgggactgatgctgagagtggtttgcaagagtctttgcggcggcaactatgaaataaataagtattcgagtgccaagatatgatgcaggtcccaaacaaacaaaggggaaggcataggatggctctaaatataggccgagggttaccacatacctttcgctacaatataacaaactgttgttgggggtagtaatttggttttcacacatggcgctggaattgggtcagcttttatgtgcacgaaagaccggtgtaaggaacacagatgacggcaacaggcatgtgaggaaataatcccggcaggattcaaagataagagcttaggggtcacataccaaaagttcaagaagctagccatatcgaattcagtgtcgtccgcagacgtggacttgctcgctcccttttgtcctgagcccaatttggaaaatgtgacggtggcacctgaggtccctcgtcgatgtaaagcaggacgagtagacttggacttggaaacatgaggagaggaaggggagcggcggtggaagggggctgattgagtcatagcggtgtaggctcaaatgcctcactatcttatcgaaaagactctattgccgagactggagcaagtgtggagcacaagggcccctggggggagcacagactgagggatttgtgtgcgaagtcttgaatccaactggaatgtgccgagacgggtgcaattgggaatacaaatggggatttgggaaaatggagaaacaccggagtatgtatattgagaaacgtggggttgacgagaatcccaggctgataaggtcgtgttagccatctgacacacttgcgatgcaaccgccgactatctttagccagtgagtgggggggggagataaggccgagataagaaacataccaaataccaaggatgtctataacggaggtctattgttgtatagttgcaataccagagagaaaggggaatgggtgacacaggaatcgaaaagaggaaacgaaagaatataaataccaagtggaggaacatctgaagagaaaacagacgaagcggaaaaacgtgctgttctggtaggatgagacgatcacgtctagactcttgggacgagaaacccttggggtgatgtatcgggtaagtcacttccgacagcctccgccggtatctgcgcgctaaacagtacttgcatggtacttctcgggtactccccgggtccttgcccgtgcttgcccccctcccgacacgcaatcaatctagaccagctgagtcactggtgacgagccctgccctgacgccagctataattagttagctggccctgatcttattcttaatggaagggtcttgctctgtttctctggatctaactgtcgtcgttctgaaccgcctattcgcttcgttaggtacggacagattgtcagttcgacctcgcgatgtcgacttccaagtatatgcaatgcagtggcgcagggaccatatctccggagggggtcggatctggcgtgatcggtagattgacaccattcttcacaatcggtatattagtattgtatctactccgtacaagttgatacttgcatactggcatgcattgtataccatggcgtataccgtggaagagccacattctaaatgacgccataaatgcctcgacgagttcaaggttcatataaacagacccagatggcgtgaacaggtgggtgtgaaatacatcatcattcacatagtcaactacaatatacagcttgttataggtttcttacaaaatacttcagataatactccgtacagaataacggccggctacggcgacaacgaaaagagatcgacggatcgaaatcgaaaatcactatgggggtagtatgtatgaaagtgccacacacactaacacatctgcctatgacatgcgtcgctagccctcgtcagagaggggggtagtggtgggactaccattctaggccacactcacctgagcaagtcgtagtgctaatcgtcgatcttccgtcttgcgtgtttcgggtctatggggaaaaccggggctttctttcgagaaaaatgccccgatgactgccccatttagctttttgtttgtgatcgtttttcctcttttcccgtttgctttccgccgggtaccgatttcgttccttggataggcgatatcgggatataaatatcacagggcaagctgggattgatttttatcggtggggccggtgacatctgtcaacaatgaatacatcataactgcaaagcctgcttgagtcttagacaaagccgatttatgcgacgtggagaagaggtgatgctgacgtccactttgggttcggcgctggattctatctgggtatctaactaaatatcgtacaaataatcgctcatgctttgtcaatctccatcggctccgttggaggggctgctcgggatgccgctggcgtgggtgtcgaaggagcctcggtgagtgcattccctggtgtctcggcctggccctcatcggtcagtttcactgtacctggtcccggcttgcctgtaaaccgctcgggtactccacgggctgcctcggccggcccgacaaagcatcccagcatcgaactccaaatatacccctccgatagcatacggcggatttggctatatgcatatgaattggcgtaagggagagcggtctctggatcgcggtaacgcgaaggcaatgaagtgatgacgcatagagatgacgagatttctattatgtagggttagccttattcctaaaatttcaaaatgatacatacttgtcaaacggccgagctttttggcgttgaagtacatgctgtatttgcgattgttggcggtcgcatagtcaaagttctccaagatcgtaagacagcgtcccgtctgctcaatcactggagggggttctggaatctctggtgctggttccttcaccaatccatttgataattgtgattcggacggtaatgtggatggttggtttaggctccggactatggcgttttcgggcaccgtggcttgactggtggctgcaggagccggcaaggcttgaggggccagtgagacttcagagctaacagccgtggccgattcaactggccgagacccatccaatggcggtggttctggcacagtcgtcccagctgcatgtgctataggctctgcagaagtcggttgggcagcaacgtgcggagtggccaagcttgtttggtccgttgattctagaactttttgatttttcgtagaatctgcagccgctgcagccactggagaatcaatatccatagcatcctcggttttggtgggtacatcaggcgatttttgaatagagccattatccgcagaaatcgatgtatgatgagacgctggaatttccacagcaaacctcaatctcccataattcttggactccgaggattgcccttcagctgtgatggattgatcttgctcaggaggtactgatgtatttgcgtcaacacttggagctttttccatagcattgtccttgccctgctcggtggaagtttccatgattgtcttcgtctctgggattccatctggttggccagcattcgtcccggacactaagggggtgtttgtgttctctgcagtgtctgtattctctgcggtcggggcagcattctcgggtggcttgtttccagtcggttggtccacggtggacgtcgaaggaggtagagattctggtggcccaacaactacatggaagtatggtggttgtgatgtgcctgtggttgaccccagtgccttcaactctgccgcagccttctctttatcttccttctctttctttttcttcctcagttcatctttatctaccttcggtctgatgtcgattttgcccacccgggtgagacgcccgttcgtccatgtagccacaccactccagtaggaaatcaccggaccgtcaagacgacgattttgtagtgcttcaatcctcgctcgtctttcgtccgcttttcgtttttccgaaagctcccagcggttgagacttttgctattgagccgctctactcttgctgcctccgcaagatggtcttcctgggtcatctgcttcggtttcaaatgggccttccgcttctctgcctccttcattgtagcgatgatgcggactcgtttttcctggctgtccttcagacgagcatgcgtaagctccttgttgaccatggtctgtcgacgtgatgattgccgagtaggcccatcctccacagtgggaatccacgagatgcgctccgactttttcttcggacgaggggcggcggacatggtggacggagcggtcggatcaatcttgactcgtttgcgcaaggtctggaatcggagatcattctgggctctgcgcttcttgcgttcgtctttttgtagtttctgttcgccctcgtagtcgttctgcgcgttcggcccttggtcttcatcctcgtccgacgattcaagcaactcgtcctctgcatcagggtcggccacatccgcaaactcattatcgtcttcgacttcctcaaatagaagcgacaagtcatcatcggcagcggcttcaaggagggccgacatgtgcagtcctgcggtgcttcgtttcgcgcgtcctctgaccaatgactccacgggcatctcctctccctccgaagactggaccgcagacgatgggtcttcttccattatgtcggccatggtgttactggtggcaggtgccttagaacggacgattaagcatcagacgcgagaggggacgcgcgcgcgacagactatgctttgcgtgtcaatgatcagcataaattagaaaaaaatcaaagcatatagaatttggattctgccacacaattaaatgagctgttggagtgatgggaagataccgctgcgggctggcaaggagagtggcgcgaaagaaaagtcgatgcctcaggcgtgtagaaatcatccgaccaatggtctttactaacgtgtttacatgactttgaagcaacgacacaagatttctctgattgttatttggtcctacctccattgcacagtgactgatactactcaacttttatctagaagtgatgatctaccttttatgtactacgatgagccaccctgttcaaccgtaccgaatgcttctgaaagcttggcaaacaccttgaagatccggagagcattcttcaaggctcgacagatagccaaagcctagtctatttacgtctccaacacagccaccacgacccatgaccaaccccagagggccccagctgacgcctctggcaaggaagaaggacggggacacgtacctgatccatatcccttgcaaccaaaacacagcctttggtttcaaaccccagtcagttctccttacatgactagttgcatctcatcccccagggatatcttcgtattcgccatgaagtctcatatgtatcctgtcacggattcaagcgtcgagacatgacgcaccggaaggcggggcctttttcgtttccactcctgtctgccttttcttgcttatgccatgagcccttttcttccgaaagaaaaccttgaattggacatttggagggcatggggttgtaagggccttgtatctgtactaaacgtatacctttttagatttgttgatatctcaccatgttcagccagaatggagtcttctaaattaatgtcatgggccgtgccattgccagacgcttggaggaattgccgattccttatatttttgttcccgtttggttatttcgacgttgaatgtacagacgtgcaggaagtaagtactttatagatgcctgtctagtactaatgcaccttggatgtaccaatactagatagaaaatcaaaccgcctagagtgtcatagactaaatcaatccaattccattccattcaatcagatttcgtattttcaaccaaattcatccgaatcaacaatcgaattgtgggtgaagctgaaggagggccctccaccaaccacagccatcttcctcgggcatccggccagctccccaacatctcttctccttcctttcctctccccttctcatcctccctttgacttcttcctcacttctctttttttcttcttttgctttctgcattcttagggtgaattcgactttcggttagtgttgatgacactttcggagcgcaacactaactcactttccagccacctcgatccctttggacccggatcatcctttccatctttatttctcacttgacgcactttgtgccagaccatctttgtgaacttcgccgtgtttttgagcctttgacgacagaaaaggacttttctcttttttcttagctcgactcgattgctttgggacacccgcagattgtcatacaacccgaacaaacggtgagattatcatcaaagaccctcgacactgcaccgtggtgcttggatttggaaagcatcagtctcggtacgcaaacatcccaacgattcatctcggctttttggaattgcttttcgacccctcccactttgcgaccccccaatagcaacacacatttcgaacaccatctaatttcgactgtttccagtgtgccctcgatccttcaatctatccttatcccatgactcctatcccacactattgaacgaagctacatttaagttccgaccttgctatattttggcattcgcgcggaggtcatatttggaagggattcgggccctgccttgctgaaggtataaagtgataatccataatttgccggtttcgcggcctgacggtcagatgaatttcaattacatcccaaccacccaacccatgtcgggtacctcgacggggcgcagctctcctagcgatgtggccgggtctgggaactcaagaatgtccttcgggccttcttcggggtccattggaagtttgaggcccggggctggctccccttctcatgatttggcatcacgtctgtactcgaagcggtaggtttgcttctttacttcctgtgggatataacagacaccgcgacaattggctgatactttgactgttcaagcagagcccgtgaaattcaagctcaagaaggcctttctcctagtatttggggaccccctaccagcggccattcaaccccgcttcgcgagaatattcccgaatcgccgagtcaagatagttttccagatttgattcctaccagcaatggcgccatggacagccctggtcgccgagctcgcgctggaacggttccatctcgttttcctccgatgggcacactgaatgagatggattttcagcagtcttatatgccacagacttcacgaccaacaccctcaactagtccgtttagacctcccggtgtttccgggatagatacgagttctatcgcgagttcgactggtgtggccaatccggcatcgctatctcgccttcgagctggctcgatgccgcaaaaaagcaacttcttgggaggtggcggtcccttcggtccatcactgttttcaaccaactggtcgacgggtcgggagagagctacaactttaactagtattcgatcttcggaagggccgacttcgcctagccactcatctttctcgagggatggactcgcggacaccgatgtgaagactttggattatctgggactcgctgagaccccgcaacacggaatggcctcctatggacgtccgtctatggaagctttgatgcaacagcagcagcagcaagcttctgcgctgccgccactcttggctgagttggcgatgatgaagagcaataatcgattccgatcatactctgtcaatgccaaggagaagtacgccgatgacgaggatcttgaatacgagaaccgctactcccaacttccctcgggtactatgacgccgaccgccgccgcgaccgccgcgcaacttgccgccacacaggcccagatccaccagcataatctcgcggtccaagcttttgccagccatgcctctgtcagccgaccccgggcgcgaactgctggcattttggaggcacctccccagcgatcatccatccgcaattaccttgctacaccttcccgcctcgacagcagtttcagtgctgctgatctgcagattcccgagaatggtgaatacgacgaattatccgaggcagttcagctgatgcatctcagcggtaacggtattcccgctatgggtggccgaccggccggcgagatggcagatgagaacaaccaggatgggcctacgcgggcactttggattggtagcattcccgtgtccaccactgtcacgtctctggaggccatctttggtatgtatggaaagatcgagtctacccgtgttctcactcacaagaactgcgggtttgtcaacttcgatcgccttgacagcgccgtgcaagccaaatcgctgctcaatggaaaggaaattttcccaggcgcaggccccgtcagaattggttacgccaaggtccctggtgcatcggccaccggtactcctggtgcaaacggcacccagtcatctcccactcctgacccgaacttcagatcaaatgttgcagcgacagatgggccggatcgcgcggatactaatgttatccctcagattcccgctctggctgatctgttgcctgagatggtgcaaattgtgcaagaattcggcgccagtgatgatgacctgaagaacatcacggcaagcatccagacttccatcgcgttcaaggctttcaaggatgaaatcccctcggtccaggaaacgagtcagtcccggatgttcgacgcccctcgtctccgtgacatccggaagcgcattgacaatggtgcatgctcgatccaagaaattgaggagactgccgaggccatgcttcctgaggttgcagagttagcgtccgattatttgggcaacaccgtggttcagaaactgtttgagttctgctctgaatctaccaaggagcagatgctgtctcacattgcaccacatctctccgaaattggtgttcacaagaatggaacctgggctgcgcagaagatcatcgatgtcgcgaagactcctggacagatgcagttaattgttgatgctctccgcccttatactgttcctcttttcttggatcagtatggaaactatgtcttgcaatgctgcctgcgatttgccagtcccttcaatagctttattttcgagtccatgctcagccgaatgtgggaaatcgcccagggacgtttcggcgcccgagcgatgcgggcttgtctcgaaagccaccatgccaccaaggatcagcagcggatgcttgcatctgctatcgctctccacagtgtccagttggctactaatgccaatggagctcttttgctcacttggttccttgacacgtgcacattccctcgccgccgaacagtattggccccgagacttgtgcctcaccttgttcacctctgcacccacaaggttgcctacctgacggttctcaaggtgatcaaccagcgcaacgagccggatgctcgagacattgttctgaaggcactcttcttcagtcccggcgatgaagttttggagaagattctgagcgaccagacatctggtgcgactctgatcttcaaggtcttgaccaccccattctttgacgagtctatgcggactgaagtcgtgaaaaacgtttccaaggtcctcacaaagctcaaggcttccccaagccaaggctataagcgtctgatggatgaagtgggcctgtcctcacgaggtagcggtcgggagcatcaccatggacgtgagcactccaccccggagaaatcgcaacaccgtcaatcctctcgtcatggaagcacaggttatccagcccagccatccattgaccgacaacagtacaatgggcagtttactcccaacacgtttggccagaacccggacaaccgccctatctccgccgatcaatccaaccccccgccccttgatccatattccaacgggctcggaaaccacatgaacggtcttgccagtataggtggatacagccaggaacccctgagccagcaacagctgcaataccaagccttcctcgccgcacaggctcgcggtgttcccacgggctatcctgccatgccgggcgccaactacggctacccagctggttcgaccatcgataacctgcgatctctacagtcgcaacaggcttctcccctccccggaccgggccagatgagtccgatgctccagaacaactaccaacagttcagccctgttgtcaatcctgcccagatgtatcaataccctccgcaatactacccccaggcacagcctgtgcagggacagtcgggcggaggccgacgtggacgggtgagttcattctcggatcggccctaaaccgtataatccgccgatactaacgtgcatgcttgcgtccagcgttgatcccatcttcgtatgatttctaatcgatctaccttaccatctacatgtataaattttcttgatcatcttttcttctttttttctcatttttgaagtttctcatggagaccaagcgggtttatccagctacgtgttgtgatttcaccgtcctatctcttcaccctgatcggacgctggatcgccggcaggggagaacggacccgggagacgaactggatacgcatggggaatcggtggtgaaaaagtcttgtgtctcttctgggtggaggcccagttttgtatcttcggcgtttttgaatgaccttgtatcttttgatcttacgataggacttctcttctgcctgttgtcttagatcgagatttggctgcctagtggagcatagtgaattgatgcagatgtaaaaaacactatctcgtagtgaatgtaaataaatcggattgaatgagtcaactttgtcaacatcctttgaattcatgaggctgagctccacaactacccggtgcactgcaatccacagcttattttcaccatcgccaaccaaccatggcaagagaatgaccagtatgagcaatactatacaagaggagactgcaattctcttccaggataaaaatatatacctcatcgatatcccgcattcaatcgcgctcgcacaagaggggaggccaacatcacaacaaccaacctcagaatcattaagaacagaaaagagcacgcataagaatatactgaatctactttcatgctcacctatcaaagagccattcccctctaccgagcccaaaaagccagctgcgctcgctaatctcctcaacaccattcccatctctgagagacggttccactcggaactgatactgccactcgtgagggattccctcgaaactatcaaggctgggtgttcccatgatcgccggtggtgtgaggcacgagctgtgcctagtgaatctccaaattatgatagcagaatgccgaatcagaagcggcggtggggaaatgattatatatgcttagagtctgcggatgacggtgtttcgactcaaaatgagccaccaataattctgtcgactacctcaccgaacgacttcgaggctttatcagatcttgctattgtcaagaatccatcaccagagcccgcaatcatcagggttggaagctgccatcgcgacgaagcggattcccctccgtgcgaatatatggcaccacctaaatcgagctttgtgctttgtacactacctctattccaaactgagatctaccgcccatctacatccaataactatcccatccccgggctcccgcaccaccaaaagttcaatctcatcctcatggacccgccgtggccaaacaaatccgtgcgacgcagcggacactaccaaacacatcactattccgagatggatgtgcttaccaaaggattacgagatattctccgtgtgcactcgcacgaccccagcacaaagcaggggctacgccaagaaacccataccgaaccgatccaaagcgaacagtctatagctgctatatggatcacgaatgcggaaaaggcccggcgagcagcatacgaggccctgaccggcgcgggcttttgcatctgcgaggaatggatctgggtcaagactacgtgggacggacagccgatctcagcactggacgggctctggcgaaaaccgtatgagattcttgtcattggccgcaagggtgaccatagtatcaatgtcaatgtcaacgctaacgccaacaatgctacatctctgtctcaaatggatgacctgacgcggatgagtgcgaccattaccacgagacgagtcatcgctgcggttccggacttgcattctcgtaaaccgaacctgaagtcgatttttgagaatgtgtttttcacggatgctggtcggtgccaggagtattctgccctcgaggtgtttgcgcgcaacttgacggctggttggtgggctgctggtaatgaggtcctccggtttaatgctcgtgagtgctgggtcgagcttggaggtagagaatacagtcatgcatgaatgtgcatatgcaaatcaggttttcaggtcagccaggttcatttcgtagatttacgacttccagacttccaatgctgtcaacaagtgggtacaattgactcaacgcttattggagggtcattaaacttggctcaggttgtatatgtgtgatgcatacatgtacatagaggcggtctgatcctagggctaccatcgtggacatgcttattctcacgggaactgatttcctcccgatcagcgcggcaggagttccgcgctgacaaagtacaatataaaaaaaacccctgtagaattacacaccaagggactcaattacaataataaaatagtaccaggacttctctcacactacatatcttcccagaaacgcgggaaacacactctctcgcttagactgacctgtgtgacccccaaacctgccgaccaaattcagcttcatcgaattgacagaatttaccagacacaaatcttctgtctatgatttcttagaaatggctaaggatcaagaaaatggttcaggggtcaagaagagctcggatcgtccaaaatgcttcaccagcacatttcaagaggttctcttcgtcctaactgccacaatggccattggccagcagtccttcttccagggctgtatcgtgggcgtgacagcatctattggcaaggatttgcacatgaattccgctgaaatcacttggatcaacgccggtgcctcgtacgttttccccacatttttctacgggatttccccgggtttctgaatccgatctctttccgaccccatatacggagtccatacatcacaaaacaaaacatgcaaacacataactaaccatgcactcaaataccacagcctcaccagcggcgccttcctactcaccttcgggaagctagccgacatgttcggacgcaagatgctcttcaccatcggcatgggcggtttcaccatctcgctactcatcgcgggattcgctacaaatgccatctacatggatgtcttctcggggattttaggtctattcgcagctgctgtcgttccacccgcggtcggtgccttaggcgctacttacgagaagccctcgaagcggaagaaccttgcctttgcctgcttcagcgcgggcaacccgctcgggtttgttggcggcatgatcatctccggtgttgcggcgcatttggctaactggcgcgcttcgttctgggcactcgcggttgtttatgctatctttaccgttttgactgtatggacggtgccggctgatgggtttgcgaggacgcctttgagtgtcaaggctttgaagcagtttgatattctcgggatggcgttggttgttgttgggtttgcgttcttttcgagttcgctttcgtatgtttttcccccgtggattggataccttcttgaacttcccgctgactgttatagtctggctgcagatgcacccgatggctggaaaactggatacgtccttgctctgtttattgtgggctttttccttctcctggcgttcctgtattggcagtccgttgctccacaccctctgatgcctctttgggtctggcgagatcgtaatttctctcttgtatgtgttcgactttctcatgtgcagatcgaaactaactgttcagctcattggaacttgctgtcttggcttcatgggcttctctgccaccagcttctacctcgctctatatcttcaaaacgtgaaacatctttctgccctagagatcaccgtccagctactcccaatggttgtcagcggcgtgctggtcaatgttgtctgcggtctgcttctgcatcgcgtaagcaacaaagtacttaccggcatcggagcgctggcgtatacagcttcgttccttatcctgagtttcatgaaacaagatgctacctactgggcgtttatattcccagggctagtgcttgtcgttgttggtgctgacattcagttcaacgtcacaaatgtacgttcagccccgcatgtcctttctacttcttgattccttgtctttcagcagtatgttccgtctttgaggtattgacttcattcagatgtatgtgatgtccacccttccaccatccgagcaatccatcgccggcggcatcttcaacaccgtcaacaagttgtgtagcaacctgggtcttggcattgctacctccgtgcagagctcagtcgcccttcgcatgactgcctcctcgcctgctattcggccttatctctcggtttattggtttgcggctgcggcttcgggggtgtctttggttttggttccgttcttgacaattggtaaacagggcaatgatgtttcgcaaaatgaccagttgatcctcgaggaggccggtgagaagacagatgtcactgctaagactatttctgtgatttcttctgctgttgatatcgcggagcatgagaagaggtaggtaactagtttactgggaaaattagcccagaaaagggtcggcattgtgattgagagcaaatgcgtgggatacctgaatacaccagatatatctgggattgtagcatatctcagtatatcccaacttttctttcagcaattccagacatatcattaaatgtacctaataacatactgtcttcaaggcacagcccgagaaagacatagtatctatccgaataccagatccagaaacacgaaagcaaactcttcaccgacccatgctctaatcaaacaaaggtcccaaactaaccaaactaaacctcaaatccggattcccaccctgcgcctccattttcaaaaacctcctgacccctaactccaacgcagcctcactaagcgcatcctccccctccttcaagacccccctagctaacggccccttcctcctcccgtctaattcccaaagcgtcccgtctagccccctaacaaaggcaacgaaatgcagatctacattatcctccgccaacggcgcagcggtatcccccagtttcgccgcatccgcatgagcactctccaacgccttactctcatacagcagatctgcgcgctccaccggccccaacgcttccgcctcccggagcagggtatccaagtccgagccagcaacgacatgtttcctcgcctcgccatttgcgaccacgtgcagcaggccgatcagcccgcatgcgttgcggatcgtctgcttgaaccacattaccggctcagcggggccggagccggtgtaggtgtctttgggggcatcttcggcttcacgtgaagcttcgtaggttgcggagacggggaagaccaggaggagggcctgggagggccgtgggacaaaggctaggagttccggctcgtcgatcgagaaaacgtctgtgaagcctaatgtgggggctagtcccagttggtgcactaggtgggacatcacttccggattgttttctgggattggggttagttttggcccttggatttggaggttttggggttggggttggggtcgaacctagtggcacaaaggccttttgagtgggggggacatcgacgtgtgccattgtgtttgattttttggtggtgtgtagataggtaagtgtgtatgtagtatgtctttgggttaaggtgagggttagaaggattgcggggttcgggcgtttccacgttttcctgcatgttcgatgttaattacggagaagacttataattggttttattggctttaatcggctctagttgggctctaattgagtgaaagttcgttagaaacagtattagtctcttataaagtttagacagacaaattgacaagagaatataaaaataaatctgactctccatcgggctggagtttccaaatcaggagcatcccagagcctgaagaaacaggctgcaatgtatgtttgcctggtttgcagcttacgtgtggcgcgtttaagagttagctaggtaacactcaatattaatagttagccaccgatccttaatagatcctcaatagatcctaataacagatccaaccggctaagttgatttgggtaattctccactgacctgtcaaacagaaagcattcagatcgcccatttctcgacagccttaaaaggagggagttaatcaccgaggaggcaccgaacttatccccccgtcccaaagtggatgactaaaagtggacggctctgacaaaggcacgcactaagtgggcggctgcatactccgtgctcgccggacccagaaagccctttgttattcaagacatttagtacggagtacacgccgttagtgtcgggttgatgatcatgatcgccactttgcctgctcaaaactatcggaccttccgaatacatctagtgtcccaccagtaacgatgggattggtatctgatttcccgtcggacccattccaatttcggaggctcgcaggaaaatggaaacggggcctggttaaacaaggctatggacataagattaccagatgctccatagcgtcgacccaacgacatggtagcttttgttcacccctgccgataacttcccgagcactaggaatagtgaaacatcggtgggacttctcatggagaaaaattgggtttttgcgagtccatgtttctcctatacgccatgcttggaagtcccaagatcatgatatttcacacccgtatattcgcgtgacctgacaggggtggtgcaatctagcggctcttcactcagtttatacgcgtggagaaagccacgactgttgtcgatcaccacgaggtgggcttagtgctgtttttccgtggagaccaaaaaagcatctttgacaagctaagggctagaagggctaaaacgttctagttctgctttactcgcccctgtattttgtggcttctcgtggcccgtgacataggagggtgttcttttattaagaatccttctccaccactttgaaatccttccggtatgacaggcattcaagatgacagacgaacagcagagaaaaatggcatgccagaccgtggcagcggtctttctgcccattgccactataacggtggcgctgcgcatatatgtgcgtggctggatcgtaaaggcgtttggatgggatgatggggttatggttggcgcaatggtatgttcaatattcttcaattcgagatctttcccaaaactgttctgtggggttgtatcagagtcagagatctaacaagctctaccccagttattctacgctatgttttgcgggactatgattggaggcacaatatacggcacaggttatatgcttgaccacctcactgtccacaaccgtgtcctagcaaagaagtactggtggctctgcgagattgcctactgcttcgcctcggttggatgcaagatctccgtctgcatcttcctcatgcgcatcactatcaaacccctccacatctggatcctctataccgtcatgctcttgaccgtcctagcaggcctggttttcatgttgctcatgctcctccagtgtaggccgctgtcatacttctggtttcaagtggcacgcgacgctagtatccacggcaaatgcatggatatgaaggtcattgtcatcatgacctacgtttacagtgcatttgccgccctgtgtgatttcaccgtcggcttgttgcctatcttcctcgtccacaatcttcaaatgaagcgccagaccaagatcgccgtcatggccatcttaagcatggcttgcatgtatgtttcaactcgggtctccgtactagttctggatcactgacaagagattccatagtgcttcatcggcggttatcgtccgtatgcccttcgtcaacggattctacgaccccgatttcctctgtatgttccgactctcccgaaaacaaggccaacgcacgaacaaaactaaccaaatctttcactctagacgcaacataccaaatcgccatttggtccaatgtcgaagccggcctcggaattacagccggcagtctcgcaaccctccgacccctcctccgcatgtggacgggctcccactcagatccatattacaataacaactccgggttcccgtccgcgttccccggtggacgctcacggtctgcctcgcgccaattgggtggatgtgataaccgtccgtttcctttgggctcgctggatgacagcggtcatcgcttgagaccggataagcttgctgtcactgttacgactatccacagtcagagggatcctaatgatctttactccacgagcccgactagcagcgaggagaggctgacttcggatcggtcatcgcctcgggatattgggttggggattcaccgcacgttcgaggttacgcagacttcaacggagaggattgattctgaaaggatagctgtgagggaacatgtataagtgacccacgtataacatgactcaaaataatatatactaatatcttgttatcgaattggtccgttcgggttgtataaagtcattctattgactcgtgaagaatgagttccatcattcattacaacttttggtcatgcctcaagcagctctcttatattcacgaggttgcttcccctgcttcaacggctcaaaaatatccgtccacagctcattggcctcgcccaggaagtatgtcaaatcaacatcggccagactagcatccccatccccagacaaagtctcaagctgcgagatcaagttctccagcccaaacgccttgcccgttgcctgcgttgcaccagcttcgagcataacattgacaacatgaatatggaaatggtagtaagtcggttgatctaaaattcaaagtcagcaaaaaaaccaccaacgtaacgaaatgcaactcacaatgaacgtaaagcttaatctgatcctcctccaaaccaggatacatagaaaccgtagcctccagcaccctccccctcaaatatttcaaccaaggcacaaaactcttcttcagatccctcaaactccaaatatccctcctctgcaccaaagccaacaaatgcaatgacccgatactcttccgatcccaattcaaatccggtaacatcagaaacccatcatcaggcccgagcccctcatcccgcagaaccacatcctcctgctcagtcctgccctcaagaatattaaacacccagttcagccgcccctcctcgcgcttcgcctgcatgaacggtcgcacgtgcgcacggtatatctccgccgtctccgtgaccatgcgcagatgctggtccgagtacttcttgatgtgctgtgcggtgcatggccagatgaggttgagtttgaggtcttgctgggggttcgcggcttccgcgggagtggtcggggccgtgttgttggcgtttgatgacgcgagataccagcggtagatgtcgttgtcgcctaggttgttgactcgcgagattgcggcgtggaaggcttgtagcacggcgagggattccgtttcgaatgccgcgcgctcggctattaggatgccttgcgtgttgtcgattgtgcctaggagggcgattcgtcggccattttggtctgggtttcttttagttcattgaggctgcggggtaggaggtggatgggtcggaccttgtttgaggagcttgctcacttgaaatttggtgattagtgcctctggggcgagcttgccggtgcctgcagagtcggccatgttaagctttcaatgtgggtatggctatgtagttaagttcaagatgttgacgatttactcagctttatcgggtggggcggtcaggcttatcttagatcttcaagctatcagatggaatatatgttgcaatgcctcgatatcagtatataatgctgcaaagttgctttgatgtcagtttcaagcaaaagtaaatgtatatcacaaaattatgctaccagatgcactgatctacagcctgaaatctatagaaatcccccattgactccactctaacccaacaagccctcaggcagtagcagactcctttccagtcttccctgatgttagggttgtatgcatctaagacaatcagaaaagaaccagggcaaaagaataacccgaatagatcataatagatgggaataaaacataccgcgtccgcaaactgcagccactcctccactcccttgacaaaagtgtcatctgccgcaggaatagcctcatgtccccatactacaaactcatcaaaggtcctctgaatctccataatcttcactggttcctcgggttcagcctctgcatcctcagcgccgtcattgtctgccggttgagctgcaggtaacacacggtctgtgtgtgttgcgactacacctatatattttcaatggtataatcagccaattatgattcaattaccgtttttgtatatccggaaccctcatttggatgttctctcataccttgatagccatcaggaagggcgacgcgccgacctcgaagtttgcgtccgcggaaatatgtcgtttgtgtattatctggatatgaagaaatgttagttctggtttgtacattagtctagctggattttctccatctagggctgtctgtcttgcatgcctttttcgtcttgcactgtccaataccgatccagtgaatcaactggcccatcgtggtgaatccggcatggaatgatatttggcacacattgcagagccgagtcattcttctcggattgtgagctcgcttttgcgcaaggctggatggcgtacatgtcgggcattgtcttggttgctcttcgtagaggacgattctgagtgacgaggcagtaacggtataaaccaggatattttctgggcctaattgttttccaatctgttcctatgttgatcaagtctggataagagaggtattgcctgggttccgcggtctgggtggttgcgctaattcttgcaaaagattggacgtgaggcgcgacgcgttctccccgttctccgcgttaagtggaaattcgaggatcgactgcaaatttatctatttatccctacgtatattgtagaagttttaatgcgtttaaattcgtactcgtacaagtaaaaaatacagctaattctcgtggaaatgcaaaacaattcaattggcaatgatcggggtatacatgtacagagtgtctaagcatgtctcgaaagctatatcgaatatttaactacatcaacgcttgcgtgtggtcttcttcttcttcttctttttctggccctcacccttctccctgttgtcggcaatcatccgagcaggccatttcttcaagtgctcccgctcaaacgcatccttctcccggcgatacaaagccatcgtagcccgagcatcttccacactagaatgcgctccgtcctggatcttgattcccaagaactcctcagccaaaatcttcaaacgtggtgatccaccacctgcgatcctccgatatggcgggtgcttgctcgtgtctcggatgtcgcgcttaggatggctgagaaggagaacgtccaaatcattgctgacagcatggccgacgagaatgcggtccttcaagatatctgcgatttctttctgaacgtgctcaagggcccttgcctccaccatgtgcttcggggcaatcccgctcacatgtgtgcgccaatctgtgaccatctccttcggccgcacgtacgaatcgtatatttggtcgccgttgaagttcacgacactgacgcgggcaagtgcagagtcgctgtcgggatttggtccgacgcccaccatttcgcaatccatcgcgacgtatttccctagttcggcactgcagctggatagttagtattgatatcgaaggacgggccaaatagtatggctgtccgtctgtgccctggcacttaccttggtgaacggccttcattctccttgtgacgcgaactcgtctcgatctttggagcggacgcatcggctgaatcgccggtctctttcttatcagacattctcttgcgcttgagggttggtttggcgtctcggttatatggcttttgcttctcggtcaactttcgtttcttcacaatgccatttccagagtcgagctcggagggcttgcgcttgacagtaggatccttcttcaatgtcgcctgcagcttcttccaattactggaaagcgccgtcttgtccattctgtgttctgttggtgagagaagatgggaaagataaaaaaagccgataagcaagtaaattttcgggacccactttttattttgcggatagttgaccaggcgacttttatacagcgccatttggactatatatattatctttacggtttttgattgagtgtttagcgtgtagtctttacttaatttagctgtaagtgcttgaaatatattgaaatcaaacccgatcctaacatctaaccttaggaccacattatatgtccagataaacaaaatgcacgcgcttttagagggaatatgcagaatcattcgtacccagtcttgaaatccttcgcagtccacttctccgtgatctgtcttctggccttgcgtgcctgggtgattggtgtgcgagactcgagcttaccttgaacgatcaaggttcggaatctgtcatccaagagattgccttccggcttcaagagtcgcagagaatcctgcagctcgtcaggaagcaccagctccaacggctgtgcgggtacactatagagcttgttagtcgcaacatggacataggaaatgaaaaaaaaaacgtacgccctcttgccaccgaaggtcttcttacgaagcgcagtctcatcaccagcttcatcatcatccgcatccgattgattctcgcgctcgagctccctttctttgatttgctcggcgatcttgagaatatgctgggcctgttcatctctctttactctcgctgcctcccatttcgctttcccctctgctagcttgcgtcggatggccttgttgcgctgtgtcttggacttccgctcggggcgcttcttgttcagccactcggacttctcgtactcgctttcgaatccctcccaggcactctcatcatccgacttcacctcgccgttgtcgttctgggcctcctcaatcaaacgctgcttctcagcttccttggcctcttccgccaatcgcagcttctcggcctcaaccgccgccgcaccatgtgtctccaatagtttatcccactcttcgaacacagggttgtaactggttccgccgtgcggcactttaacagaggggataggcttcccattggcagcaagcgagatcggggcgtgttttaatgtgctcggctcaaccttgggcttaggcttctgcaggaaatcaaagcgagggtcgtcgtacttgagcgtgggttcagtatcttccgcccacggatcgtagaactcattttcggtcttcttggccagagggtttccctccttcgctacttgctttaggcggagatattccttcttgctaacccagtcgctcttgggcttcttcgtcttcggttcaatgactccgtcggtgacgttcgggtttacacgcttccggccgtccagggcggggatcattgaccgctgggcaaggatttcgtctgacttgaggggtttcttttgctttttggcgatagccttgcgtacgtcttcattaccaacagtatcgagaacgaagagctgatcggaaggcttttccgagatgaggccactagcaggagaagatagttaggatcttaatccacaagtaaagagcagaaaaagagataataacggtaaccctaccctgtgatctcggcgtccttcagatcgcgcaaaccctcctgcaccgcggtgatatcgacattcttgcgccacgccttcttgcccttacgggaagtttgcttgaattgcttcggggcatccacggaggtcgacattgtggaaaacaacagagacagacagtcaacgttgatagtatgaaaatattggcttatctttttttccggtccaaaaaaattctggatctgcttatctcagcacgcgcgggggcggtgatcgcggttaccacgtttaccgcgcttggatgagaactcgcttttcttccgcttcaagctgccatcacttacggcgcgtgaactccctagtgccagtggtcgtcattttccatccttctggtggcacgcttgatcttttactatcgcttttcgaaagtttgacactgcgcttagcgcgatcgcacgccatgcctgtcgtcaaaggaggtgtctggtaagtgccaccgttggaactcgccctcgagttctcgtcgctaatatactcttaggaccaatattgaggatgaagtgcttcgggcagctgtacgtgatataactcactaggaacctctctagcctacgttttatgagcaaaaactaactcaatcgcaggtatccaaatatggtctcaaccaatgggctcgagtctcctccctgctcgcacggaaaaccccaaagcaatgcaaggcgcgatggattgaatggttggatccgggcattcgcaaggtcgagtggtcgcgggaagaggacgagaaactgctccaccttgcaaagctgatgcccactcaatggcgcactattgctcccatcgtcgggcgcactgccacacaatgtcttgaacgctaccaaaagctgttggatgaagctgaatctcgcgagaatgacgagctcggtctcggaggacctggcgaggagagcgctgcccccagtgcggacgatgtccgtcgcctgcggtacgttggttttcctaaagctctgtgttcgtgttgctgataccttttagacccggtgaactcgatcccgacccagagtctaagcctgcccgtcccgatactatcgacctggatgaagatgagaaagaaatgctgagcgaagcgcgtgctcgtctcgctaacacacagggtaaaaaggccaagcgaaaggcccgagagcgtcaattagaagagtcgcgtcgactggccgttctccaaaagcatcgcgaactcaagcatgccggtattaacgtcaaggttgtcacgcggaagcccggtcagatggattacaatgcagacattccattcgaaaagccagctgctcctggattctacgatacactcgaggagaaagaccagaatgaacgccaacgagaagcgttcgatccccggaagcagcaactcgcaaataagagaaagggagaccaggacgacgatgcggaacggaagaagcgcaagaacgataaaagcggcactatggccgcctctgctgcagctgcacgagccggccaaatgcagaagattcgcgaggccgaacagagcagcaagcgacggggtttgaacttgccagcaccgcaagtcagcgaaagcgaaatgcaagatatcatcaagatgggaatggctggggataaagctagtcaaatgaccgccgatgaaacaggcactcgggggcttattggaaattactcgactatcgttggaggaactcctatcagaaccccccgagctgcgccggaggaagatcgcatcgctaacgaaatcaagaacattcgagctttgactgaaactcagtcttccctcctgggaggggataacacacctctccatgagggcagttcatcaactggatttgatggcattgctcctcggcggcaagcgatcgtcactcccaaccccatggccacgccattccgccaggcgaatggcatgggtgcgacacctatgcccggtggtattggggccggtgccacgccattgcgcaccccgcgtgaccatttagctctgaaccgggaagaacagggtgcccagctcattggcagcacaccccgagacattaaaatgtacgagaatctcactcgccaacaggtgcgcagcaagctggcctcgctccccaagcccaaacaagccgagtgggaattagaggttccatccgaatccgctgagcccaccacatctatggagatcagcgaagaagatgcggccgagcgtgatcagcgtaacaaagaggcacgggagaaggccgccaaggctgaattcaagcgtcaatcacaagtttaccagcgaggcctgcctcgtcccgctgttctcgatattaacgctttgctgcaacgtgcgtcccaggtcaccggcaccatcgaaggcctgattgccaacgaagccgccattttgatcgcacatgactctcgcaaattccccgtccccgacgcgcagattcaaggccaagcaccaaagttaagccaattggacgaccgtttcttggacgcagcacgagcttctattgccgctgagattgcttccaccgaagcacagctgtccgaatggcaagataaattcgacgacggctggtcgtcagcacgcgccaagtctctgcctggccttgagaactacgaggatgacgagcaggatcccttccaagaagaacaacgcatgatcgcggcctttgatactgttcaaacttccctctttgatactgccgagcgcggaaacaagctcgagaagaagctgtctttgcactacggcggataccagaagcgggctaagacgctgcggtcgaagatcttggaggctggtgctgctttgcccgccgctataaatgagctggacgctttccgtacactccagatatctgaggagtcggctgtggtccggcgacttgagagactccgggaagcagtgtcatttgttatgcggcgtgagcgagaggctcaagatttgtacaagagccgaaaagatgagcttgatgaacttcttgccgggacgggtacggtcaatggatggcactaggtagtttacttcttttttttctgcgtcatgactacaatatcttgctcttctgtacaattactacctcagtctaatttgacgaaccgtacgcggtcattttctggaagatatcaccgagttatccaagttatagtatgccatgaacagtttgataaagattttgcattgatttagctgcttccttggttgatagtgtccgaatatttgaaggctggggcctctgtggtctcgattccgtgaatcaatgccatgcttcatagatctttatatgaagccacaaaaaaagattcattagtaaagcaccaaccccagcattactattcgaacttaccgatgtcacgccaggctttggagcatccgcttgattctcgtaaactccagcgaaccgcttatcgtacttggaaagagcatccttttccaccaccgaaagatcagggtgagaattgccaagttccaagggaggtagggtctccaggatgcgaatgtagagcgccgtcgaaccatccccaacaaccgtcggatcatccgcattaaccctctgtctgaggcacgcgttgaccttgtgggcattgacctcgtagaactcacgaggcgtgccacggttcgcataaacgtggaagtaaaaagggacatcgtggaacttctcgcatagctcaatgatattcattttgtcagttgtccagccatcccagccgtatatgacgaagatgcactcagtcttgcatgtgcgggcttcttcgagagccattcccagatacttgctggctcggctgttggatcggatccggctgtgggcgggctggatgatggtctgcatcttgtgaggacggacgcccaggaaaccgaactgtttacggtgctcggcgagggtgattacaagcagtgagcgcaggtattcgtgcatttggttgctgttcatttctgcatttgggtagttgtgatccttcaggtttgaggctcgggcgataaacaccaccactggaccgagggggttgggggaatcatgcatagctgtcaaggatgggggttccgaggtggtgttgttaccgacaggaggtggacgaggtttgtccggcgattgcttgaaatgaagcatagccgaagacgatgatatgcgcagagattgagtgaagaggaacgaggaatgatggaatggaagagtagaaaaggaaataccccaatggagatatgaaggtttgtttacgtgtacggtctggtggtgtctacccaaataggaaggcacgtctagaggaaagagcgacacagactggaaaattacatggacctggaaggaaggtggataggaagcgcacattgtaaacatacaagtcggtgagatccctcttggacataactatagaaaagtgacaaaatgatattgatatagacccatttctcacagctcatcgcttcttgatgctgatatcgatctttccaatgccccaggcagcgacaaagactgtaagcaagcccgcaaagatggtgagaggcttgcgcagggcatcgaccatggagtgatcgtacgtaacctaatggcgaattagcataattgcgagatgaacaagtgacaatacgattagtacataccacgaacttggagtcgcgcgcttcgtcagtcagactgtcaacctccagggtcaaggtggtccggcccagagtatccatgtaggtcttgagagtgttcaagtgagcgtaaatgtgcttggcgccaggaagaccattactgttggtcccctcaaggagctcaaagcgaacattgtgagcaccctcagggagcacaacacgcacaaccacacgctcatactggatgccctcagccatcttaggtccttcaatgagggggaccttgaggacataggagtcggagtcgacacccgcggcacggcgcaggaacgaagcaaggtcattgttccacccaatacggaagctgtagttccagcctccgaagatagggtagcggggcttcagctccaaattaccggcgctcttaccaacactcggacgatagcggctggtcgaaacattgccgatatcgtcaatgaagtaaggatcgacagagccaggcagaagcggatatgttagctcacgaagcgccgaagtaggcgctttctggtaggaggtgaaggtccactggacacgcgagaactggttggtcagctccgagccgttgttgcgcagccagtaccgttcctcggttgcgagattgccgccccagtgcgagacttccaagtcacgctctaaaaggtttaccgtgatgacgggcttagtgaactcatagcgaacggtaatggggtgctcagtgcccggggccacctcggccgtgtcatacgggccgtaggtgtatgtggtgcctttgcgctcggggtccgagccggacttgagaccctccgtgggtgtataatccggcacattgttgctggggaacttcaacttggttttctgtgtaaccgtcgtgtaggcggatggcatgtaggcggagaaggagtaggtgaggaattgcttgtccgcctgtccaatggtggcaggaagtgggctgagagaggaaagcactgagtacgagattccaagggtaatctgcgacttcggggccagaggctcgggaaggtgaacgacgaaatactggttgccgctgtttcaattgttagtttaataggcccctgacatggccattgacctcccaattgatactaactcagatggtacagcttcggtatagtctacatcaaagcgtcccttctcgggggccttcttatccctcacttcgaagcctccaacacggtcaaacacttcggcagggaaggggatgtagtagtcgttctggggctgcttgtcgacattctccacaacaacattgatcgtttcccgcacatagctcttttccagattggtattgcgaaccaaatttatgtttttgaaaacctgcgggggcttgaagccggacggaagatccaatcgactaggcgtggtaaggttggttgcagcgcacaggctgggcgcgagcagcccgagcaccgtggcggtgaaaaacctcattctgagtacctggaggacacaatttctccgaggttcaaagggttcaataatccaagatgtgattgtgtctggtcggtgaaccttggaaagcttgcgcagctgatgatacgtggtccccattgtatactagggtcgccgaagcggccacatcgcgcactccggcttatcgctgataagggcctagctgatcgaagcttctcctcatctcgcatctttacttcttgcatacttgatctacttgacttgcaggttgagattggctggaggcacagctgaaacttattttcatatatcatcatgttgtcacacacgatgtttgcctctcgagctgctttaaggtccggctgtttgaggggaacccaactgttatcagctcgtcgctaccatggccttgcccagagcaggttctttaaggtgtcagacgaggtgcgtgatgcaattgctacaggtaaaccagtcgtcgctcttgagacgacaatctatacacacggtgagtctttctgcgttcattcctgggattgaagagcttcgcccaaaagcggggaagccaagactctaatcagctgtaggtttcccttatcctgataacattgctctcgccgcattgttagagtcggttgtgagagccaatggtggagtgcctgcaactataggaatccttggtggcgttgccaaggttggtctgagtacggaagagcttatcgagctggcctcgacagctcaagagaagagcgctctgaaagtgtctcgtagggatctcggatatatctgtggcttagtgagttagctgttgcaatggctcagagaactggaactgatatatatcagggcatggttggtaagaaaatgcacggcggtactacaatctcgggcactatgatcctgtcagaactagctggcatcaagatctttggtaccggtggactaggtaaattcagtgatcaaagctcaatcgaaaaagaagtcaatctgacttgccttaggtggtgtacatcgcggagcagagagctcaatggatatctctggtaagagaaccgtgaagcaaaacaaggatccccattattgacaaatgattatagccgatctgactgaacttggacgtaccccggtaacggtgattagctctgggtgcaaaagcttcttagacatccctcgaacgctcgaatacctcgagaccgaaggtgtctgcgtgggtacattcgctgatggccgggatggtgccgttgatttcccagctttctttacccgagagagcggcattcgcagtccccgggtcattcaaaatgaagctgaagctgctgccatagtttgtaagtttaccccatgtgttgaaagctacagcctcgttgacggaatctccagatgcgcaatcaaagcttccagtatcctccggcatccactttgccaaccccgtccctctggagcactcaatccccaaagccgagatggatattgtgattgaagaagctatccgcctttcccatgtagagggttaccacggcagtgacaacacgccatttgtgcttgctaagatcaaggaactaagcggtggaaagagcgtagtcgccaaccgggccttgattgagtctaatgtcaagcgtgcaactttagtagctgtggaacttgccaagcttgaacaagctgacctaggaacagggtctcggtgagttttgtttctagatacgagatacgagattcaaccaatgctaagttcttcgatctctatccctatagacacatgccatcaattccagatgtagcttttccaagtcaagttgcctcgcaagttgaagatttccccgaaccagccaccgaggcacctattacaccaactctaaaggcagatgtcgtggttgccggctcgttagccatcgacttgtcctgcgactacactccattcggagacgaactcacacaggttgcaccagtaccacatacctccaacccagcaattatcggacaaagcctaggcggcgttggccacaacgttgccattgccgccagctacgtcggcagcgatgtcatcttctgtagcgtcgtcgcagacgatctcagcggccgcgctgcactctcaacccttgaaaaagaaggcctcagcaccgcaggcatccaagtcctcgcagcgacagcaagcacccgcacagcccaatacatcgcaatcaacgacaccaaaaaagacctcctaatagccatggccgacatgggcatcgtcgagctccccgaatccgaactcgacttcgacggcttctgggaacctctcctcgaacgcacaaagccaaactgggtcgtcgtcgacgccaactggcggcccgacgtgatggccaaatggagtgctgtagcacgcaaacacggcgcccgcgtagccttcgagcccgtttcaacagccaaatcccgacgtctattcggcaccggcgcgactatcggtcccaaccagatcgtgccaaatgatgctatcagtcttgcgtgtccgaaccgcctcgagctgacggctatgttcaatgctgcgcgggaagcatctcttttcgagtccgcggaatggtggcatctcattaactcaatgaatatgtctccgacgggctcgcgccagcaactcattgcgctcacttcgctgtctctcgttgacgagggcattccgcagcagactgttcagctgcttcctttcattccttgtatcgttactaagctcggtggtgcgggttctctcctcactcagcttctgccgcctggtgatccccgtcttacggatccgaagtctgcgccgtatattctttctcgcgcgtggggaccggacttgcctttcggtggtgtttacatgcgtctgttctcgcctgatactattctagatgccaaggacattgtcagtgtcaacgcggcgggtgatacgctgctaggtgttgtggtggctggcttatccaaggatccttctgtgcgcgtggaggatgtcattcctattgctcaggaggcgagccggaaaacattggctagcgctggaggtgtgagtaaggaattgggtgagctgcggggcttattggggctgtaataggtagctgtgaccccgtactaatgacgttgattgcctggatcggaagtcaactcgaggcactagcttgctcagcggtgcttggccaagatctataaaaagaaattaatcgtttagacagacatcgtttaacaaagactttatgacttaaccgattgcaggatgtaaaaaagggatgtgctgttaagacgtataaaatcattgccatgttcattaagtacacattagttagtcgtggacctcgccttcagtggccgagcgaggttcccatcccatttcagccatctcaaacgactcgaataagaaggccggcgccaccgtacaccccacgagtgtccaatcacctagactcctcgcatgctgccactctccacgctcaacgatagcctgtggccgttcgccctatatcataggaattaagcattgccaagtggagaaacacgcgaccatatatataaagaaataactcacctttgcaaaatcaatgcccagaatcatgtcccgggtgggtttcccatcatcccaggatagtgatagttgcataggggcgccagcgtagtagtgccatacctcggtgccatcgagaacacggtgccattgcgagaggccactttctccctcgagaaggtaataaatacaggtgctgtgcgagcgagtgtttgatgaatggcggtcgcggaaggtctcgacgtagtaccctttttctggatgtggggagagattcaaggtcttgataatctcttgtgctgaaagatttttcgccatgctatctagagagtagagatgtgcttgggttaaaagaaaggagacggtgaagtcaaatatacatttgtttccctatcccctcgattagtcagttgtggtattgataggcgtctgcatgcttctctcccctctccttagcaaatcacatctcggtgacgtggtgatacgatgtagatctgagacaaggttaataagcaaagcaatccagctgaaacatgcagatagatgcaccagttggaggcatcagaatactttcacatccttccagttgaaccttagcccggaatcattgcgagctgaacattacgtatgggcaacatatatcatggacattgatgaagtgactcataaggttagccctacgttcccaaaatactatgcgaactgtctcgcccgcaaaagcttcgaggggcttatcctcgtcagcgcggccacatgtccgttgaggatcacgacacttggctcctctcgaagcgcatttgaatacgaaaactccactcccgataagtatatcgttttgataatccctattaatcattatgcagtcattacaagacagagacacctagtgctaaaacactaaccaacgctcaatatccttcgccggattttgatgacggcacaagtcccggatccaacaatccaacctgcactagcacaccagcctggtcccaataaagattctggcgtgttatttgaccagcattgaaggatgccactacaacgataatgacctggatatctcgccccgtcggcgaaacaccaggtagcagccatggaatctcagcagtatgccgacaggagaacaacatctcatccacgatacgatccacacctacagtgcgtgaaagcaggcggatttgctgatcaaccggcccagcaggaatatacacatgagcgaagaaatcccgcaggcttgcgatatcagagcctgtaatatacatatcagtaaattcccgaaccagatcgtaggaaataaaagaggaaaagaaaaactcacccccagcctgagtaggaatacacttcacaaagacctcaccagcaggacaccccatctcgccataatgaccatgaccggtcaacatccccaccgccggctcagcactagaatgctgatgttttttccgcatctccatctcccccagcacacggtcccagtattcttcccagacagtctcgatatcgataacagcccattggctcccaacattgaacgagcggcgcagacaccctagcgcgcgactccacgccaattgcgagctgatctcgtcatctgcgttcaattccacatccatttcgccttctttctcctcggcaacttcccgctccgcgaacccggctttggactccgggtacgtgtacacgtagcatcggtgttttttcttgtaggtgacgtcgccttcggaggtgctgagctcgatccatggccacagcgcgcagggctggactcgtgggcctggaatgtggatttggattgggaggtatgttgacttggcggctgggccgaagattgcagctgtgtctgagcagcctggtggcgagcagttttctttttccttgtaggtgaattggtcggttgaggagagggggtagtaggctatcaaggcacacaggtgtgggaatgggtttgtgttgctgtatactatgtggtgtaaggctaggaggaggtaggcaggtcggtgatatgctggggttggttagttgggttttgctatatcttgcagggctgaggtttctgcttcgaataacaaagcatatatagaaatagacaagaaagtataatagaagacgtaccaactatcgcataccgctctccattctcgagttcgtcttctttctcgtgcaccgcattcttcagcgctttcatatctctctctacattcccgctgccgaggaacgggatatagatcacatcgaatccttccgcctgaaagaggtggactagatgggtatcgaactccacggtgtcggagatcaggatgaggtgtcgggaagatggctcttcatatcgccagctgcgtgtgccggagctcgtgctcactgtccggcgtattccgtgcggatgggatgccgcggaattggggcccgtggtgtctgcgtctaggtctggtgggttactgctggagctttgggctcggcgtcgagtgaggcgttggaatacgttgaccatagtctgaatgtggttgattagatgagctgtatttatattgggagtttaggaggacatgtagtccttttatatatggaagtttctgcttcgtttcgggaagctcgggttggagttcttggtattacatgtgtcaagacgagaaaatagatgccaatgcttagggtttcttgggtgacgtcgttgatgttgcataccacgataagatatggtagggctgcacatcttcatgcttggaaaaagcatctaatagaatctagaaatgacacgtcaacaaaaagatccttcttctatgtctatacagcgaaatgatctgcgctatagggaaaataatcgcaatgaaggatactcatctcgccaacccccaatggcatgatatatctgaccccacttaatcaaagctcaccaaccaccgacgatcctcgctgactttctcggatgttttaccgctgtcaacaagatagctcttgtaagcgtcgcgcagcagactctcccgcgcaacctcacaatccacccgaatatcctccaccaacgcctccagcgagacataatcaaactcaggccgaatataacccagaatcagcaggttgagtcgcgttttgtagaaatccggcaagcgatggaacttagtatggccctcgtgccccgcagcggtgggcgatggttccgtgagagcgggcatgatatggatttcctaaagtggacaaccacgttagtccgataccccaaaaatacgagcgcatttcgtctagtttattgtatatcacgtaccacagatcgcacggtatttttatagaaagggttatatccgatactcaacacagccggcaaaaccaccgcagtagatgtgctgccctcgactatttcatgtttgtatgttttcgggtcgagcgctacaacgccgaagtagacgccgcttgtcagctcggggtgcttctcggacaggtcgtcggcggggatattggcagtgggaattccgagctgtagtcatccgggagagcgagtcagcggtaagttcattgtgcgtgttgcgctgcgcgattatagcaccgaggttgagtccgcagagtcatggacgtacgtctttgctcccgcggccaaatcccttgatcactggccctgacagtcgcacaggataaggaggttccggggtatcggggccggctacccggtcgcgcagcttggagcccatcgctggcggttgaggttgaggttgtgtggatacgggtcaggcttgggatgtggtgaagcgtgtatattggcgcagacaaatctgctaataagtttgttttgtttggcgtatactgattgtgtgatttagcaatggtttggcgtgatgctggcgttgagtgtgtctgaatgcgaccagccctggtgggggttatcgcgataaggatgcattgcgtacataattaaggcgcctggggtatcaggcattaaaccacatgtaatctcgcaaaaagcggcaagcactaaaacggaaagggaacgccaagaagtggcagaggaaatcaagtacatacatagggagtagatatatatttctactacattagactaattacttcaacacttcaacccaagtacattcccgtctctcatgtcctcagatcgtttcagatcgtcacatacaatgctattagtaccgttccggagtagcaagacagtatatacctacactagcaaaattaagtcacttttgtcaaataactactttatcatctgcttcatcgtcaacttatttaaatttagatccatggatggttcaggactcaacgaggtcagaagtgaccccactcaatatcatggcattatgctcatacagtaactatcccgtcccagcttttgtcccattgtcccttttgagcgccacaaataaaacaagaaagcatatcgacaatcctggaattgattccaggaatccaagaagcataacttatatacgagaacatagaacatgagaagaccctgtcggccagtggtccaaaagaaatcaagtccaaaggggatcatacaatcccagaatcaggaaatatgtactgagtagaacagcagaagaaaagaagacaggcctgatgtcaggccttgccgagggtatgaaaaggtaatctgaaacaagagcaggaaacaaaatcaaatgcatggcaagaactggaagacagcggattagcatgtaatcaacttcaaaaggtcgtgtgatattaattagaaactcacattcatcacaatgagcatcgggatatcgaacacatcgcgtttcactgtccagcagtacgcgcattcgacttttccgtccttgagaccgagctggttcatgccggcctcgccagcaatgccactcttgcggaggtggttgttccactttgcattatcatcagattgtgaaacatccatgtcctccttggtcttatatttgagcagcttgcaccgagtcatgacactaccacgagaatcgccgaatgccagacgcgcaaagtcttcgtagaactcgacaacgctgtcatcgtcgaggagttcggccaagaataccggttgggggcgtccagtgttggcatactctaatgtggagccgcgcggtgtgaaactcccgcgtgacgttgtcccggattggggtacgcccgaaccggtgttgacgttgaggtttttatcttttcctagaagcacgtctttcttccatccggttaggatgctgaattccttgcctacggcggcgatttcgccggtgcgtcggcagacgatggtcggcgttccgcatgcattgatgaagtcctcgtactcccagagagttcgctggaagcatttttccatgaagatgagatcatcgcgattaagggttttagtagttgcgataaaagagggtcgaatagacgcaagcgctttagcaattcgcacggtcttttgcggcgaaaagcgacgctggatgaaagcagtgaggttgtggaagccacttgtgtaagcatagggctccttcacgctttcgtatattgaggaaggattgcggtggcgtcttttagaaccaacatgcagatttggatgcttcagtattgatgctgacgtcacctggcgttgtccattcggcaccaggctgttggacttgggagcagaagcgatattgttaaatgtcccgtcctcgaatgcagccgttgtaatgttcgggcttggggctgagccaggactagtgaagtttgttggcgcactttcgatcgcaaatgcatgtggtgcgttttgtttcatgtgttcggaaagcatggcattttggccatacacaccgccgacattcacatgttggcccgagggtgcggtcgaccattcgtttaggagaggatcgccaaacatgaaaggttgattccccgggctttctccgaaaccgggagctggtgtggagaactgggccgagccactgcggccgatcgaccctcgctgtcctgcagaatcagtaggagagtcaccggccgcgccggtggccatgtgcccaagcatgccgaattccagagcaccgtatcgattttcgaagttcatactcgataaatcgaagttgaagagagctggatcactgggatcaaaaaatggccctgcaaaaggattttgagactgacttgtatccccagagagagcagtacttggagtagcctgctggttcacagttgatgaaagacttggatttcgaccattggtgctgctcttcatattgaaagtaggtgaaacgggtgattgcgtggtaaaagggctttggctcatcgaagattcttggtagggattgtaggatgctgtctgcgtctgagacgtagggtaaaagttgttgctcgtagtactggttgtttggttattgtgttgatgagtgtgttgttggctgagttgctggttggagttgacagcatttgcgccatttctagatataggcatattattgcggagcgtgttgttgtaaagattggtgctgttgctgctggtggtactaacagctggcatcaatgccccatcgggagcgtcatggagatacttggccttcttgcgaacaccatcatggcaagcatcttgaagaccacgtttgatgcaacgttgacacggtcgttcgtcgcctaaacccgatatatattagtcagatcgctaacaagggcagggatcagtctatcatcataccgcaagtcaaatgagctcgttggcatgcaaagcaagctcgccgagccttctttcgtcgcggtcgggagggatccttggcattcgctgctttgcgatccgctttgctatcgccattagttttgggctttatgtccatttgctcgtgttctgtgatatcggcagagtcccgatctccactgtagtcccctgcaggacccggggagccgttcttagcttccatattcatttcggcatgtaccccgagaacggtgatctatggacgcgtccacaaaagtgagggagatcggtgtttcagatccagtaggccaccttccgtgccttcttttgttgatctaaagaaacagagcgtggtggcgacaataccaatgataccatgagcgcttcgtttccggcgggcgagcggatccacgtgcacaatattcagcccagcttgtgagtgggaaaaggaaacgatcgcaaagtcctaatcgtccgtgtaggttcttgaaatccacccaaatcacctctcgaaggttggagagatctccggtccttggttcctataatcgcgcgtttgcgactacagttggtggggagtcggcaccggaatcacggcgagtcgagtcacgggtgtaacgggggacaatcgactggagaagcgacggatgtacgatgatctgacacattgaagggtttcaatgtggtgggtagatagggagaaactggcgcaaagctaacagcagaaaaataccgcaatggttcggggctggagtggagtggacggcttcgttcggttgcggggaaggtgtgaatttctctccaaacacgagagccgtgccgatgcgaggccggtcgagaagctcaaaaggaagaaggtcgagaggcaatgcaaatattattcgcgcggagggttgaagaagaagcggatgattctaagaagggctctcgatcggagtgttcccgtgactattgtctaagcaacaggactctaacacgacacagtccaattgtaaaggacttgtagaggactaactgagactcgcttgagcgatggaatcctttttttttaatccttttttgtgtattttttatatatttctttcacaatggcttttagaattttggcactatatttccctactaaaaaggcgcaagactatacttagagtatgtactccgtaaaaaacagccactattttacctgattaatttttgttttttttttttttgctacccaacctaatctcacgttgggcgtgtcttaattgaaggattatctctgatcagaaatcctgcgagtatagggttctataagaaccaaagggctctaatatgtacatcatacattcacatgctgacgttcagggcgacggtcactggaggcattattagttatgtatttgactatgccaagtattacggctttcataacattaccagaaacaacctgtaatttaagtgcatccacaggctctgattggttgaactacaatccaataccagatcgggttcagcgcataccagatgacctagacaattagtagccccgcggcacgtgcctaattcgattgtatactctgtgccttgttagcttctaaattacccaacgttcaatgcaagtatatccaatttgagtcattatttttttctgtcaagctgaatcgatcccgagaaacccggtccagactttccacagttctcggcagcacgctccgattccgttttgttccgaggcagactggatgcgctctgccgaggctagaaggatcgcgacagttataccgctcagctatgactgtacttttaaaggagggattgtcatgtctgcttgccgccaggggtaagttggttggggatgattgccggtgcatgaatttcaagaccacatgaccctcgtatgcttcgcaactggactggcagactgggggtcccgtcggagaattaaagcctgggccaggtccgcctagtttctattcttggcgtgggtgggatctatttacccctagtgtgtatataaaccccgctagtacatagtatgaaaagctataggtctgcttgagattaagaacggctagatcgaatatgcaagatgcttatatggaatcaaatagagctaggatatagagcatatccttgccgatcatgcgtattattaactatgattttatgcattggcttttacactgcagacggtacagcagctcaaagcgttatgtcctgacatccccagtagccaaacgtctcagcccaaggggttcccaacatctggtcatggatgccgtgttcatctccttggcgcacggtgttcaagaccggttggtaaactgttgagatgcaatggcgccgagggtagacctgtgtcctcgcgaaatagccatgcagccagcgaccaacccgcttgagattaatgtatgtatgggttattatatgtgcaccgcagcatcaatcacgtctgtgatttcgcaaacttgcttttacttcggatccatgccccatggcgaaagaataggtatctatcatcaatgtcagtacaatgttcggcagacagatcaactcatgttaagttattgtctttagatccacaaggaagctgggatgtcaaacttccatccttgaggcgacttgctggggtttcataatgcagggggaagaaataggtatagcgtgagaggaaatcaagtgtgtcaaaaccagcacgtacggaaaagggaccatgacaagggttaggaacgctaacaaggaagttgcccattgatatccaaggttgtggtacactgcataaccgttagccataatcgttacctcaactgtgtgcaggcaagaatgtagctgtcaagcattgcagaagagctactggtcggcctgttcagaatacagcgcatccaccgcattggaaatatgcgcttcatgcaaagcacgggcttccaattcttatcccagcacaacgagagtgtagacaaacttactttgtattccaaatagcggaaatatgcctccaaaggatgaccgagcgaagctgttcgctgccagagcgctggcggcaaaagtgggatatgcatcgaccaggaatgtgaagatacccgagtagactaggatcgtcctagcagtaacacgatccaattagcatcacgcggccgaaaaatgcgcagacaaggatggtcgcccggctaggtggggttgaaaggttgatcttaccctgcaccaaaaacagcactgccaataataggcgcaatccaatggacgttgggatagattgtccaagcaaaaatgaaaagacctatagtaaccaagggtcctcccaggatcgctattccatgaaagtcagccattatactcttgggaccttggcgcctgagcaattatgttggcaaacttacctgggggcagtcgccactccggctggaagtcatcgagcgagttagtggtttttctgtaattgcgctccaagcgaatgtaattttggcgccagatcggatctgacaaaatggctataaccattccgacaaacagaccgaggaaacacagtccacgctgccatattactagcccatacacatcattgaagactagctggaaagcaccaaagaagaggtacagaatacccaagaggatggccgagaaaatgcaaaggcatagacacattggctccaatgttaagaggagaacagggcggtacatggatcgcagaactgtctgggtcacagaccgctgcagcttttcgattggagctttccatcgctcgtctccggtttctaggcgcagcttctgcgccttacgcctcaaaagtctagaacattattagcgtcgtgatttatcccagaatctggaaatacatacactgggtgatatgtctccggaacgaagaatataatcgaggcgagcatcactcccgtccaaatcaagagcacataaaacgtccaacgcctgcgagtgatataagcttcaatagttgtcagaattcaatataaaacataccatgtggtaaatgcattaatgaagccaccgactctggtgattatgttagtattaagatcagagggtaggcaaaaagaacgacctacagaggaccaacttcgggaccaacaaatggactcgcagtgtagagcatcatgggaaaggcaagctcatggcgatcaaacatgtcaccaacagtgcctccagcaacactcaaaaaggcactgcctgaaagtccggtgaaaaaccgagcgataaccatggtctcagtattcttagccaccgcgcatgggataagccagatgagaaacagcgagtacgaaacgagatagatgtttcttcggccatagaactaagagaattcagatcagcaacgcaatatctagcagccaaagtctcaaacgtacttcagataatggactcagaaagagcggaccaattcctaaagcgaaaaacatcaacacatagtcccgcgtaagacgacaagatcagcacggaccaagaccccaaataaaaaacgacaacccaagagtcgcaacttcctgcgagcatccgaattcactcatcaactggtcatatgtcgtggtatacatcgaagaggcacaagtcctacatgcagtaagtcagcttctatgcggcgcagagatttcaagaattaaccggctgtacactcacacgcaaagagaacccatcgagataataacgacaaccaaccatctccgggctttgctcatatttcgcggattcataggatcgttctcctcccagcccacaatatatgattcatggtcggtcgccaccgcagcctcgtcgacatcatggctggcaacgctgacgccgtcattcaatgaccagctgcgttccaggggcttggatgtaactgatctagacgcgctcgagcgcagttttcggagcggtgtgctgccttcttcgtgagtacccggggaggtgatcgcagcataactcagatcatcggatttggtgcggtcgaatttgatagcacccttaccactagagggtctttcggggccgatgcgggatttttcttcgctagggtctgggtgcgacacgtctgtacttgaccgcggagacatggtcaatgggcaaacggtcaattgttagatttgatcatctggtaagtctttgtgttatctatgaagtcataggaaacaaatcgaacggtatggagctacctgggtgtatgtattgattagcggaaatgtgagtcactgtcttgcgagggaaaatgaaggggattctccttagcgtctagaaatcaaattcaacctcgggacttccgagctgatcaatcagtttacggggtcctaattccgctatctcgaagccgacctcgggagtgattccgccttggacattgattaagtgtaattctaaccatatgtatgtaatgttgtagaaaattcaactattctacaactagatagacatatatcgttttcaatgttttgactgtgacattagttatcggatgccaagaacgtaaacacgtgggaacgttggtgcatgtcgcacggagctactccgtactccgtatataattctccgagatcgtaggtctaaaacattgcagacaagaacaagatatgcttgagacagagatatgttcaattaagctagagctaaaactactacggaacagaaacaattcatcaacgtcgcttccaagggaccaggtgcccaaacaaaaacaccaacaaaaggtagtaaccaaagtcctgtctccaagctaaccctaaactcctcatagccattcgaccgaatgctattcccaaagaaaacaccggatctcaaatcgagatattacggaaccatcccaaagttgagctgtacaagaaaagaaagatgcgccaatagatcccagaattttggccaagaggacacattctctaaagagcctggctgagctgactcatggcaccagaagcgttttcctcggcccaagaaccccagagtgcctgctttccagtgaccttgagaggaccaccaatagacttggcgccctggtcaaccttgacagcatctttcgtggccaacaccaagatttcgaagaacattttggtagcatcggccttgctggaccgctgctcgggaaggagctcctgaaacaaaacgctcttctcctgctgggtggctgggctaccaagcttctcgcggagaatgtgcacagcgtgcttggtgcccattgaaaccggttcggtatccacggggtgcgcaatagtatcatccagctcatccatgggctggttgttatcgtcgtcctcattcaagtgcaatacatcttcatcatctccagggaattcaatctcagagcgctggttcatagtggtatcgagagcgataccctcgtcaatcgggaccatggcttcctcgtcaccaagatccagggcaggaacgtcgacggcagccacatccatatcggaaataccactatcgcgcttgcgcttcagctcaccggctttcttgacggaatccaaagagagcatgccgcgcagttcgggtgcccatccgcgtccacggtcctcaccaaacacactagacacaaagttgccattctgctgtctggtcatcagagtgaggagaacggggtcgcgtggcaagaatgatgcgggcttcaaaatcgaagagcggtcattttgctggtccttgatcttggagctggagatcgcaacttgtttatcgagtcccataagcttctggcgcttggtgcgttgaccctggtgggcgctaacggcatcaggggttgcggatacatctcggttaatttcctcttccagctgatttatctgatcggatccagcatcggaaagggggctttcggagtcacgttcgaatcggttttcggcagcacggggcgtctcgccaccatcaaagtcgttatcgttgttgaagtccatgggaccatctggcagtaggtcgttcaggttgtcgtggacatcatcgccaaggtccatcttgtcgagagcctcatcatctccaaggtccagtccgagatcgtcgtcgtcgttgaattttccagcgtcattgaacagatcatcccctacgggacggggcgcgggagcatctcgaccaatttccatagtcgggtcatttccaaggggcacttcatcgtcgctgaagttaagatcaacaagggaagggtcttcaaggcgtgcgggttcctgagaaacagagcggcggaagctactgtctgggaggaattggcttccaaaatccatgccaccagggcgcttgccagcaggctccagatctagagtttgagggaaaagcagagacgtatcaaggttggtgaaaagatcagattcagtgagcacgtcgggaagagtaatgccacctggagcgacgacagtcgaagtcaaatcattgttgtttgtgagacggaaagcctgatgtatcattagattgaaccaaacccccatttatgcaaaacaatacgtaccattttaattttcatcagagcttcattgcaatcgtcgaggaggtagcgagccttgcggctataaattcgaaccacacccaacagcaattgaccacttaatcgcagagccataggggcttgaccctgatcaacaatagcattgacactgctctcaatatccgattgcaggatatgcgactttgaaagtttgcgttcgatattagccgacaaccaaacgcgagccaacggcccggttttcgacaaaagggtctcggaatagaacatggtgtgtttgtcgcaacgagatcttttacaacggcgagatatctgtcaccaaattcggtaggcgaaaaagacccgcccggcgcgggggtgaggtgtagaaaggcgacgcgctgaagccgggaaaacaatgacttgtgcgaggattcgcacttgataattgtatgaaaaggtagatatgtgactaagagataaaggtttatcactcgatcgcgtgaaattaagacatcgaagagggagatggagagggtatgtgcgcgggagggatatcttggagttggctgagaaaccaaggaggaacggaagatgcgcgtcggtgggaatatcaggcggcaatggcctgggcgggatttttgctgacgtaatcgagggggctgggaatgtcgggtcacgtgagggtacacaaaggaacttgtacggagtccataccccgacgtatcacaacaatgaatttgctacgaacgaaaatttgcctcgttaataggcaaatatggaagagaatatcaattggactttttgtttctcaccaaaccacagaaaactcttgtataaatcagtgcatcgtatactctgccctacacgtgataccttgcgctagtcttattatagtatccggataaactccctacccgagatagctaggccacaatgggtaaagcatcatcatggggacttaactagcctcttccaagtggactcggtactctgaatgggaatattttgcggttttgattttagcaaaaagctgtttcaaatcccgtttttggtcccaggtcctctgtcggtcccttgtttgtcgtcgaccaacttgcgccgactccgcaaatccagcagttagttaagccgcccccgtgtccacgggtgaatgccagatcgcatctaacgtttattgtcgaaacatagtcaattcttacccaaacgggatgaaaactacttctcaacatatctaacgtcatattttatcgcctttaattatccatcctccaaagcatgagcaatgtcaaggtccgcgacaccttcattgcctttgcataatgcatcaaacagcgactttcttcgaccttcctccacaacagccatgactggacggccaaatgctccatcatcagtaagtatacttgactcacgtaccacgtgtgctgcccttcctccacttcttcacgccgtcagacaatggagtttctaacacatggtcttgttttcttccagacatccacttccacatattcatggctcgagcctcatgaaactgccgagcgattacgaacctctattttacatggcctgacacccgtcgaggcagagatacgcttagccagagatggaccgaacgagcttcctcacgatgagccggaacccctctggctgcggttcctcaaacaattcaaggagacgctgattctcctcctcctcggctctgctggaatctcttttgtgatgggcaactacgacgatgccatcagcattactctcgcagtaacaattgttgtgactgttggctttgttcaagagtatcggtcggagaagtcgttggaagcattgagccgacttgtacctcattatgcgcatttgatccgtgatattccaacaagttcctccgcggtgactgagaatggtggttcatcgcccccaggtttctccatggaaatggatgaaattcggagcaaaagcccaggctcggcgtctgccgcggtcaaggcttcttcaacagtccccgcgaacgaacttgtacccggagatttggttcttttcactactggagaccgcattcccgccgatattcgaatcactgctgcaacagatctgagcattgacgagtcgaacttgactggagagaacgagcctgtagcgaagtacacggaagctttgcgcaccacatctggcgggaccgcttcagcgccaaaaggaatagcaccccctcgatctcccttctacgatgcaccggcaagcggtgctgttggtgctgacattcggttgaacgagcagcacaatgttgcgttcatgggtaccctagtccgctcaggctatggtcagggaattgttatctcaaccggcgcaaatacggagttcggcagtatatcagcttcgctacaagagatcgagagccctcgaacaccattacaactgtccatggatcgtttgggacaggagctaagttatatatctttcggtgtcattggattgatcgtggttattggtcttatacaaggtcgcaagattctcgaaatgttcacgataggtgtctcgctggccgtcgcagcgatcccagaaggcttgcctatcattgttactgtcacgctcgcgctcggcgtcctgcgcatggctaagaggggagcaatcatgcgaagactgcccagcgttgaaactcttggctctgtcaatgtcgtctgctcggacaagactggaactcttactctcaaccatatgacagtcaccaaaatgtggcatttcgactgcccagaaccattcgacgtgcaaagagaaatgacgtcagttacttcttttggccctgcggcgcaaacaatcctgcgcgttggtaatattgcaaacaactctcgtttgtcacggatgcacgcaaactcgccggccagcgcatcttctgcgactgtactttcgtcgaccatcaacagtgattcggctgctgccaagagtcgatgggtgggtcagcccactgatgtggcaattttggatctaatggatatcctcggagaagatgatgtgcgcgatcgtatcagcgctcgcgtccatgagaccccattcagctccgagcggaaatggatgggtgttgttatcggcgattctggtggttcaaatggaggtccccatgttgcctatattaagggtgctctcgaacaggtcttggcgcgatcggatacctatctcaccaaggatggtcgggaagtaattctagacgagccccgtcgcaagattattcgggaagcagcagagaacatggcatcggagggtcttagagttcttgcctttggcagtggagttgttcgtgatacttctagaggtggcagaggctttggcagtcggtcgtccccgaaaatcgtacaaggtgatgatgacgagcggtacaacggcttagtctttgctggattagtgggcatgaacgacccgccgcgtaaagatgtgcacaaatccatccgacgcttgatgtctggtggtgtcagagtcatcatgattactggcgacgctgagacaacagctgtggccattgcgaagaagcttggaatgccagttaacgattccccgcatgcccgttcagtcatcggaggcgatgaactcgatcgtatgactgccgctgaacttgcccaggcaatctcaacggtctcgatctttgcccgtacgagcccagaccacaagatgaagattgtgacagcacttcaagcccgcggcgatgtagttgccatgaccggtgatggtgtcaacgatgcgcccgctctgaagaaagctgacataggtatttccatgggcaagctaggcaccgacgttgccaaagaggcagcggacatgattttgacagatgacgatttctcgaccatcttgcaggcaatcgaacagggcaagggcatcttctataacatccagaacttcattacgttccagcttagtaccagcgtggctgcactcagtcttgtactgctgagcaccactcttggcttcaagaatccgctgaatgctatgcagatattgtggatcagtgagtattcctgcatccgattctatcccttgtatttcactaacaactattacagatattcttatggatggcccacccgcccagtccctaggcgtcgagcccgtcgaccctaccatcatgaatcgcccgccacgacccaagacggcccgtgttctgacaaaacctctaatccagcgcgtcctcacctcagccatggtcatcatggttggcacgttgtcaatctacatccaagaaatgggcgatatcaccgacggtaacccagtcgaaaagcgctcccgcgtcgtcaccgcgcacgacaccaccatgacattcacctgcttcgttttattcgacatgttcaacgcattgacatgccgcagcgagggcaagtccgtcctacgtggtgaaatgccgctgtttgggaacaagatgttcaattacgctgttcttggctcgttggccggccaggcctgcgtgatctacctgccgttcctgcagcgcatcttccagaccgaggctctcgccttcgggtccttggtcaagctggtctgcattgccagttcggtgttctgggtggatgaaggtcgcaagtatctgcatgcgatccgtcgtcggcgtggggtgggttctggttatagcgtcaatgtctgatctactgagacaacgggtgtacggttcggatttcctgttacgattttagaggtgtccatgccataacgtgtagtttatcatatttggattgatatcccccatatacataatagaaatgtcggctgtcgtcatatatgttatgccttcggacccataactatatactccgtatagcacaacgttatggctactctgtactcatctcccactaacccgaattctacaaatttcgatagacgcatgttaatagaataccatttcattcccttgattccttgttgacttgaaatttccaaattcatagatacattgctcaaaaattcccacatttctcgaccgacgagacccagttccccctcttagagaattgcaatcctaaacgaagcctcaatatcactggcgagcacgatatagagtgtcatccgcagtcagcattcccagataccataagccaagcgcaaccgtgagctgcggctctttggatgtgccagtctgggtccaggggatcggagcacccagcttcaagttcccatcatcatcgactcgctgaattggaaccagctcttggtcggtaagaatgaagccaaactgcgtgccatgctgcgtcatgtaccagttcacttgtgctagaggtttgaagaattctggatcaataaaagaactattcatcatgctgggtgaccatttccatgagggcttcaggtcgcctggaaggcggttcagactcaggacatttctattgctagcttcaccagcttcatagatcgaaagatctgggatgaatttcgccagcataagagcatcagggcctaccccgatcaagatattggtgccatcggaaagcacgtcaaggactcgatcgagaacttgattgaaaagaagatcttccggttggcttggagcctgaggctcagcctggggatcaacttggggctcggcacgttgctcagcacggttatcaagatgttcaaaggtacaccgcagggaccgccgaatcagagcgtgaaggtcttccccaaatgcgaggggcaggtcactttcagacgtgagctcccgttgtggactcggggaccgaatagtatgacgctgaatgcgaattgccctgagcagcgggccaaattcatgcatgatgtcgtctatattgaactccgtccagacaccaacaacattgatcttgttcggatcatacgatccattgttgtgctttgcttcgattgtccgacattgcgaacttgaatgcttggtggtgcttgtagcaaataagcgagtagagtaacttggtttgccatcttgaacagaataaaaaggttgagagatgataagtcttgggaaatgatagttatcaggaaatgaggattgttaggagatgataattcagaactgactcctgtgaataggtgttttatatatttgagatgggaaggatgaaaggcataatctattagcatctccttcctattcgaggtcaaccgaaagcccacgtccccgaagcgccatgacaaccaacagcgggaactgacagaggtaatcattggcaatgctcactcgaatcaaagcgctaagtgtgactgaaacgtatacctgcagcgggggccgtcaccgggtacatatgcatacaagccacaagaagatcactgacctcgaataggaaggagataccaatagtagtaataggtcatcataagaaaatcattaactatgctcactcaaagcgaagcgctaaggcgtatccttgcaccggtagctttgggatcagaccacaggcccctctaggtctaacagatattactttggtctatgtcatggcctagtggtaatatgtgatatccgctcgaaattgtaagtcgttttcacctgtcaccaagaagggaaagaatttcaaagaaaaaaaagtgaaagaatatgcgagaagacgtctaaaaaaagactatcacaaagacatcacagagcatgagcccactatgtattctctagggctgtaaatcacaacatcgaaagccaaacgccgtgacctacatagaagctctttgacttgtctttgacttgtcaagccacacttgtaaatgattggctttgttatcacaactcactcaacgtgaaacgctgtgatcaagacacatgcaggtgccttggaagggatgtacttttgtatagtcatattctgccatataatgtcgccttcgcccttctatcccttcctttttctccctccctattccacttatctttaagacctatcgcgctggaaccaagatgccatcatcattttgggagcactatcgtcacccagcgaagaatattcctccacgtaaggtttatgatgcacccaagattgatatcgccgatgtggaattcgttgagatcatgaaacagacggatcgttcatttctatgccgagcccgctggcaagacaaagactgcgtgctcaaggtagtaagcgaggaagtcatatagcgcgccttcaaatttaacatctaataggtttactagttcattccttacaaaccggatacttgcgaatcaccgttccttactagggatctttttacaaatgagagccgcgcatatagtcgattgaaggccggtggcttttgtgaacgaggatcggtacctgacttctatggggtagttgagaatattgaccctgaggcaaagagctggcaaccacagctcaagaacttctacaataaaacttttcggagggtctagatccagaggctcgcccaaatggtgtcctaatcgaatatatcccaatctaaatatgatcgatatctctaactacatagagcaaagagctcagaaactcaagcagcttctggccgagattcataaggctaagattttacactttgatccctatccccgaaatatgctgattcagggtgattctgatcgggtactctggatcgactacgaacattccgaaatttatgatccagaggactcaaagcatcccagatgttttgcatatgaaagcgaatgtatgcatcacttcatggaaaggctggtaattttatcactcctagtttgattataactttatagctgacttgcaattctagggcagagatcataagttaggggagtacaaagaaacgcggaatatgtattttgactgactcttcgcggaattttgatgccatttccagatgttgtgctgatacccaattgcatatctccgagatacctttttgatcattctccaattacttatcatggcttaatactgttgaatgccttgtttgtcctatttgataggcctcatccagctagacgagcaggaatccttctcttttcttctccgctctccgagcaactccgcaaaacatgattttaatgagcagtaaaagaaaaaggtatgcccaaggagaaaagaaaatatccttcggtgtatattgtattgagcaaaaatactgaccgacgcagggatcgaacctgcaatctcttgattcgtagtcaagcgccttgccattgggccagccggccccctaataaagtaaaggtattagtcccttgatatcaaaataaccaaatcaattaatgatagtatgaattatcagaatcactcccttccaaatcaaccaatttagggtcaggaacaatagtagcattagtagtagtggcactaagagagatatctattacgtcagatctaccaccagagttactagttttactattttaactataggatataaagacgagatagaacttaatatttttaatactttattaggtaaaaagactatatatattctttagtatattctatatcgattataactataaagagatagcttttaataacgataaatagcgctagatcgactaacgtattcggtaagtgagctgcgcgcgcaaccgagctgcgcagcccaaaacacatagtaaatacgatatattacaacttgatatctcaacaacagtggctcatagggacttgtctttatagcatagtactatatatatgatatctagtatatctagggaactttaggaaaataaatggctttataactacgatatatatatttctagcttttagggacgtaattttcggtaatatttgaaatcatggtaagatagtattctactctctttgaaattgatatatagtactaagaagtcttatcaataactatcgacaaacggggagataggatgaacatatggttgttaagatataaatgtggaatatcttgcatttactatgtgttttgggctgcgcagctcggttgcgcgcgcagctcgcttaccgaatacgttagttaactaactaactagctcgatcgatgatctatgaccaaagtcaagcaaaacacctatgactgcaacctcctatgccgatgtgaaattgcaatggtgtacttggtgaatattccagcccctgtccaggctcaactgcccccgatgcgttagtgtcgcagtgcttggccatatcaatgtcatatttgtgaagccaggttgaactgagccatggcctttgaatataggaaagctattattgaggaagatagtcttagggggagacattttctgactgaatgcgatatatctgggactttgattttgcgaccttggtgagttgtaatcaaatttcttcgtgatgagataaatatgtggatatgtctcgagtgcacttaaatactaaactatattgggtgaagttatgtgcatggcaatagctttgaggtagagcaagttcattaattctagattttatacaatgaatttctttatgctcacaaatgaaacaaagccgcctcatctacgcctcatctacgtttcattaagtttagtctcagtaactggttttcggttctcgtccacagcgaagatttgcatggactcaattactcatttggtgcaggacagataggtagaatggtgcaataatacggagtagtcatggacctaatggagagtgtgactattgagatcagtagaatgatgttccgccagaatatcaagtggtatacatgtagtttgacagccgggatagacccggggtgacagaagctcgggtgattacactatgtcatgcttagggtgtcactaagctacatctgacacagctccagataccagcacctgcttgtgtcatctaccacactaaaaaggcaaccgccactgcagcccagtgacatttacttcctgccccctattggcgcctaagacaatgtattactagcattgcttccttaactgttacaaaatgtaataaaaaccattcagtataagacacagtatcaaagtccagcaatcgcctcctgccaccgactaggcataacagactagtgatctcgacggcctaaggcctccggatagtcattgcggagtgaagtgactgattccaatttccgaggccacatagtaattagagtatagggggagaggggtaccataggccacgcagtaaacaactctcctccatacattatttatttattttcttcttcccagctcgataaccgcacggcgtctagaaccgtcagaacgctctctttctttggaatctcgataagattgatactgattggtctctcgattgctagcgcgggagcgaatagctccaaaggacgcgagtagccatatctaactatcatgtgctaaccagaattggaaatactaggtatgggatttatttgaggggagacacctcttctacggaaatgacccagatggcaaagggtattcgacctgggcgcaccttgcagaagttatgggcgttctgggaccaccccctttagatatgctgcaacgtggggaacgaagtcatgaattctttactgaagatggtaagcatccttttcttgctcgagacttcgtaaaggcttacgaagatgacgttgcagggaagtggaagcaagatatagagatcccaataggaaccagtttggaaatatcagagcagttcctcgagggaagaaataaggagatgattatggcgttcatgagagacatgcttcagtggagacctgaagataggaagacggcgaaagatctgctccaggatccgtggctgaatgatcggataggatgaagctgtgtgtctgattgccctgtcatagaatgaaaacacgcttccttcgaggagattaatcgcgccgagcactagccgtcttaccgccccataccctttctaggtatacgggtgagacggctatgtgacaatctccaggggctgaggttccaagtgtaggccggatacccgctgtagcgaaatgtcacctcactgccaactgcccccgtggcttaactgctcgtccggtgatgtcggtctgacttcgtgttgcagtagcatctcttctccacctcacgttgtaatttcatgatgtcttcgaaatattgcttgatagccttctttttcagagccacatgattgtattaggagatcgttattcagagacagcagatagcaagttggttaaagggttaggggtacggagcaccccgtatagtgctgtacctagtcacatgattgagggttcgtcgaagttcgaaccttacctacaacatagttagttcaagttcctactccttactccatactccatggtgtattgaatatactgctagtggtctgaagcattaaaatcttaccgatgcacatacctagtattttgaacaccattcgtaactactccataggatctgtatcttgattcaatccatgtcacacgtgccaggcacaatttgaaaatagaaaatagaaaagtagaattgttctcggcccagataggaaaccccgataggaggctgaatgaagacccagtcccgcgggagtggatctgacagtgcagaaaaaaaaaagataaggaacagtgtaaccttgtaattgttcaggtacaatttacatttgaagattaagatcaacacgtaaatatgacctcgatcccctattgaatatctgctcagatatattcccctattcgtagtaaactgtaggtaccgtagatagggccaatactccggcatcggtagtaagccggaacacggcgacagtcaagtcaggaagatccccggaggcatcggggaaacacggaaagcgtaaacgggaccttatctgtcgccaatcgttggctcgttcccatttcgatacgctaacccgcaaagggaaaggcttagcttacggcggagccccacttagcgccagtggcgagttggactttatctgtagccaatcagcgggccgggaatcgatcttcacctatccaattgccggtgggcgataggcatttgggggcatttgggggttctgatatcccgagaacagagaaatccaagataagcgcctgtttcttcgccgaaggtctccagaagccgaagtgcaacggtgttgagtacgcgcaagggtacctgcaggagatgataagctatctggcagtttacttgtatctagttggctatctgatttagaggttctgagtctgaaaaagatatataaagagtcgtccgcatggaatctagttccccgaaactttaggaactattccccggagtcgaactactgcatggtcccattggatcataatgtattgtccaaggtatatccctcacgggccaaagctcgaactattggcaaggcacgatccatactcccttgccacacgatgcggctgtccacgccggggatgacgaggttcctaggtgttctactggttatattgtgtcgttatactatgtgttaattattgtatacagaaatcaaatgaactgagctttgttatgtataccagaccctgacggaacattgaaacgttgaaacacgacagtatctatcgattatcccattgctattgtcacaatctctgaccacaccactgcgaaccatattttgcccagctctcgtccgattttctcctctttaccgcgccttcccacggcaataattgaagtgtttcatgattctattttagctttgttctctattcacttttatcgcgtggaatcgaattgaattgccaattgccgttattcgacggggacccactcgtgtcgatctgacttatcttgggattttgggatttttggttcgacgagttcgggtttccttatttttatatccgtggcgaaattcttctctttttaacttctggaacatccgtctttttcttcctttcgccttcacttcctactttcaccctctctcctacacctaccccatccacatccaaagcttcgagcttctgctacaatggcgttcaacgggaaagccccgtacgccccggactatgcctcctacaactggataggcgccccctccaattacgacctctcgaccaacacagacttgggcggcgattcccgtatgcgtctttcttgtctccaaacggtgtgatggttttaacatgggtcccaactaggcaccgaaaatgtcaacaaatggttccaggccggcgaccaggcctacatcctcgtggcctcggccatggtcatggtcatgatccccggtctcggctttttatactcgggattggctcgccgaaagtctgccctgagtatgatctgggcttgtatggcttcgttctcgatcgtgaccttccaatggtatttctggggttattcgcttgctttctccccgacggcgaccaacggttatatcggcaacctgcgaaacttcggtttaatgaagaccttggctgatcctagtcctggttctccactggttccaaacttactctatgcgttttatcaggtaagatcgaacatagaaccatgaatctggtttttgtttccagccgatgctgatatctactagatgcaattctgcggtgtcactgcagctatcgtcatgggagcggtcgctgaacgcggtcgccttctgcccgccatggtcttcgtcttcatctgggcgactatcgtttactgtccgctagcctgctgggtctggaacgtcaacggctgggcctacaagtacggcgtgatggattacgccggtggtggtcccgtcgaaatcggttccggtttcacagctctggcctactcgatggtcctcggtcgccgacaggaacgcatgatgctcaacttccgcccacacaacgtctccctcatcctcctcggcacagtcttcctctggttcggttggctcgggttcaacggtggatctgcctttggagctaacatgcgcgctaccatggcctcctggaacactaacctgactgccgccttcggtgccatcacctgggtcctgctcgattggcgtctggctcgcaagtggtcaatggtcggctggtgctccggtaccatctcgggactcgtagctgcgacacccgcctccggattcatctcgccctgggctagcgtcatcctcggcattgtcaccggcatcgtgtgcaattactccaccaagatcaagtactggatccgaatcgacgactctatggatgtgttggccgagcacggcatcgcaggaatcgtcggcctgatcttcaacgccttgttcggtgacgacgccatcgccggtctggacggtgtcagcaccggcaccggcgtcggcggctgggtcatccacaactacaagcagctgtacatccagatcgcctacatcgtcgcgaccgcctcgtactccttcgtcatgtccacgatcatcgcctacgccatcaacgccatcccgggcctgaacctgcgcgcctccgaggaagccgagctactcggcatggacgacgaccagctgggcgagttcgcctacgactacgtcgaggtccgccgtgactacctcgcctggaccccacagaaccacgaccagctcgccgacggccacgaggtccccgccgcgcagcgctacggcatcggcgaacacagcgagatgatgctcggtagctcgccgcgcgaggtgatgctcgagggccactcgcctaacgggcagagcagccgcggcggcagcgaaggcgacgtcggcatgcacgaaatcaagatcgcgcctgctcctcgccaggccgccgagcagaatcagaatcagaatcattccgatgctcagggtgaacctgttgtgctaaagccggtgcaagagaagacggagaactaatcagtcttacatttcacttcattctcctttctcccccttcgctttgcccaactcattcatcgtctcttctctcaatctcttttgcatgacatgcatttcgcatacgccatttttcgtttagaaagctttgattttcttcgcattttcgcttctttatctcgatatcccttgagcgtgcttcttttcttgcaaccaaaaagcctggggctttttataccatctcaaacctaccctcgattctctcaatcccgcgaatttccaccgactccacataccatccgacatttctcaccctccgttcttcccatctccacctcaaccctcaaccctctcccgctaccaaatcacatacctcaccaccttttcaatccaaatacaaccttcctgggaaaagcaacttgaattatggtctaatttggcctggcgctccattgttctaagctttttttttttatggcaatgggggatattaaactgggttctgtacggtatacaaactgcttcgttgaatgacaagggaaataataccttgctttctgtccatgttttctggtcttgcccctggaatagagcgagatagcccgatttacatttttattatctaagacttttattcacgacgtttgtataattgtagatagatggtagcttgtaaatattactaccttgcctgttactagtctaaatgcaactgtctaactagaacccgacataactaacacaaaaaataaagaattcaaaatgaaccaacgcaaaaaatgcaattatacaaaacctcttataaacaattaaagaccttcctctccctacctcctaaccatccccctaaccctaatcaaatcctccctcccaagcttctcaacaacctccgccgcaaccccacccctcctcacctcatcccactcatcctcatccatgcccataacaagcgtcatctgcacacagcgcgcaaagcactcgcgataccgatacctccccggcgcaccagccacatacccaacctcaaccgcggcgcccacaagccccgcaacatccctctcgagacgcgccgcgccgagcgcgttaatccgcgatccgtacgaccagagcctcttctccaggagccgggccaggtacgcgagcgtcacgcccaggacgcggtcgaaggcggagggcgtgagaatgcgcgcgaacggcgtgaggaggtcgttccaggcggcggtgaagcgaggcttgacgagttctttgtcgaagggggagtttggattgtcgggttccaggtttgggtttggtgtgtattcgatgtcgcggaaggagtctgcgaggattgggcgtaggcgcggtttgatcgcgttgttgaagattacttgaattccgtcggttaggaggtctgttactttgctttcgaaggttgtggagagggtttggagggtttggaggactttttgagcggtgcttgggctggggaagattgagaggaggtgcggggttgcttgtgtggtggtgtcggtgtcggtcggcttggagcctgtgttgttttgcacgattcggcggatgtagtctactcccaggtcgaggttgttcatttgcactaggaaggagatgatggtttgttcggagggtggaccgccatggactgggatgcgtgggtagcactcgtcgcgcatcttacgctgggtcatgccgatgaaatcggaccctaggacgcgtgagagtgtcgggactacgtttgtcacgactgcttcttgggaggtggcgagcgactgctggatgaccttgttgacgatgtacattatgtcgtcgatggccgaggtgatgtgtggtgggtccgctttcagtggacgctgggggttcatcgtgaggcctgatggggactcgtctagctggaaggccttttccacggagcggcggaagaagaaggttgtcattgtgttgaagggggccactaggcgatcattgatcttttgggccagaggtgactctcgcaagaaggtgggaagctcaaatcgcttatcgtcatctggctcatcctccgaagactaaagaagttgttagtgctgatattgaaggggcggagatgtactcacattacatgtatcagccaggaaccgacagtacagtgaccaccgacccagcatgatagccatctcattcaacaccccgtcaatctctttcatatccacaccctcctcgtcggtggcagtgctcgcccccatggcaggggattgtgggcgaggcgggcctgttcgctgcgcggacaggaagctctgcactaagaaagtgaaagcataggatttgatatccatcaattttcgatccacatggcgctcatcgctccatgtatcaagaatgataccaccctgtacatcagcctcgacctgtagccgttcaatgacgcgtcccatcttacgggggccatagtggtgctccacgagcccgccgtggccatcaataatctgcgcaatatgttcaaacagtttggtaagcgcatttgcatagaagaacccgtccttattttgagcattcccggtagccccattgaggttcgcccgagccttggccgcgacaccctggcacacataacgaccataaacatcaagtccaacctcagagcggccaataagcgggaaaagcttgaagaagcgtgtaatcttggctccatcattctccttaaccgccttctcaaactcgcgcaggaacaacccgcacagcgactccgccgcattatccagcgtcacacttggagggtccggcacctcagccgtagggaccatttccgcagcaaacgcgccgttgacaaccgtcgccgggatctgagctgcgcggtgtaggtagctggcggctttctcccagtcctggggcgcacccatcgagcccgccacgcctagcgtacacgccttgagctcggccacctgctcgacaacttccaaggtagctttcacccgagcctgctcgagatccagtcggcggaccgcgctagagatccggtcggcggtgccggcggcttcgaagagcatcccatggctgatggagcgggttgtgctggcgtgggtgccgatgttgacgcgcatcagatccagccggcccagctcacgggagaggtctttctgggatgttactagggcatccaggcgggcagttacagacgcttcttgggtatgcaggtgggacaacgtggctttgatctcggcgacggagctggcgttgaagatgtcgggctgtgcgagaggagatgtctcttttggtgaggcattggtatttggagggcttttgggcatggaattatgcccattggcagttgcagccattctgggcgccattggtcgtcgcaagttggtttgttgatgccacgccagttgtagggggttgcgggcggtgagggcgggttttacagcctcatgattcatgttactgtgctacgtcaagaccggcggggatttatgactccagattgttaaaccaaatagaacttccatacttgcctgaacccctctttctttgtacttcagtcgccgtttcatctgcggcgtcttaatgtggttgtgattcaacgcgacgtcatttccgccccacgctcgcgattatatcagttgctcttttccagtttcctttcctttttttctgtgtaccttctctgttgatcttcttcttattgacaagtctcttggcttgacttacgtctgtcaagtcttcaaccgccatcatcggacgtcccaaacctagacgtcggaatcggcgcaccatgggcaacgaatcgtcaacccaggtggatgagtttgcacgccccttggtgcttgaggggcggaatatcgaggcggtcgccaaatatgttaaacagcacaatgtaaagaaagttgtggtgatggtatgcagcgtgaaccccatagaatactgcatgagagctaacaagcatgcaggtgggagcgggtatcagcacttcagcaggcatcccagactttcgctcacctgacacgggaatctacgccaatctggcaagtctagatctaccagagcccgaggcagtctttgatattggtttcttccggcgtaaccccaagcctttctatgcgttggcacacgagctgtacccgggacgctatcgcccgactgtcgtgcactcattcatcaaactactttacgaaaaggggatgctcctgaaacattttactcaaaacattgactgcctcgagcgcgaggcgggcgtgccaggcgacaagattatcgaggcccatggcagttttgcatcacagcgctgcattgaatgcaaggagacgttcccagacgaggagatgcaccagatggtggccaagagcaatgtaccccactgccacaaatgcaacggtctggtcaagccggacattgtgttcttcggcgaatctctgccttcggaattctttgaaagccgttctctgccagaagaggccgatctctgcattgtcatgggaaccagtctgtctgtccagccatttgccagtctgccttcgatggttagtccaggcgtgcctcgcgtgctcatcaacatggagcgtgtcggtggccttggctcgcggagtgacgatgtgttggtgattggggactgtgatgccggagtgcgcaagtttgcaaaggctctgggatgggcagaggaattggaggcgctgtgggaggaaaccaacccagatccgcagaagagggcggaggagaatgctccgctgcagacccgagacgagcggctgcaggaggaggtggaccgactcacggaggaggttgatcgaactctggggttgacagatgcgtatcagaatagagtacgcgagaagctggagtcacacgacaaggacaaggcacaccgccagtctggaggtctggaccatgttttcccgcatttggcgcgtaagctgtcacattgagattatgattcatgaaatgtctttgataggcagaaataggagattatcatttgagtattatggggtagatctagtgcagtacgtactccgtagttatgtaggacatacggggtagttatgtcgtacataacatggatagccaacgccaagagatgataatatcatcatacgtttgcggtcgagacttgatttcggtcaaataacctggaatgttctaataatctctttatatcagattaacctattttaactatagcctaagatagatctgctataaaagcaattcccccctttgccctaacttcccccaattgattttctcgtttctctccgacagtccaaaacaagacatctacagttgccccacgttatttttccatatcgtcattcttccccctccccaacttttttctttctttcatttctcttcctccataaattcatattcatattcatcatggttggacttggcccaaagcacccgccgtcccgcaagggtgaggcttgaagagctacccctgcctattttaaactaaccatgtggtacagggtccatgcacgagctgccccagaacttgctgggcaccattcaggacctcgagaaggctttcactgtggatcgcgcgaagttgaaggaggtcgtggcacacttcgccaaagagctcgagaaaggtgagcccatgatccgctccctgattctgcgcagtcgctaacaggaaaaaaattaggcttgaccgtcgagggcggcaacattgtgagaacgacatcattcccgatcccaatttagactgaccctagctaatagcccatgaatgtcacctgggtcttggacttccccgatggcaacgagcgaggaacctacctggccctcgatatgggcggcaccaacctacgtgtttgcgaaattaccttgaccgaggagaagggcgctttcgatatcacacaatccaaatataagatgcccgaggagctgcgcactggaaccgccgatgaattgtgggagtacatcgccgactgcttgcagcagttcatcgagtaccaccacgaggaaggaaacctcgccaagctgcccctcggtttcactttctcctaccccgcgactcaggagtacatcgatcacggtgttctgcagcgctggaccaagggcttcgatatcgacggtgtcgagggtcatgatgttgttccccctctggaggagatcttgaagaagcgggtatgttcatgagatgacgataccctccccctccccacgcaggttcaaagactcacaaggctacagggtcttcccatcaaagttgcagcactgattaacgataccaccggtaccctcattgcttcctcctacaccgactccgccatgaggattggctgcatcttcggtaccggcgtgaacgccgcatacatggagaacgcagggtctattcccaagctcgcctacttgaacctacccgccgacatgcccgtggccatcaactgcgaatacggagccttcgacaatgagcacgtggtcctccccctcactaaatatgatgacatcatcgatcgcgattctccccgccccggccagcaagccttcgagaagatgaccgcaggtctgtacctcggcgagatcttccgtctcgtcctaattgacctggttgacaatcaccccggtctgattttcaacggtcaggacgtctccaagctacgcaagccctacctgctcgatgcctccttcctcgcccacatcgaagaggatccctacgagaacctgacggagaccttggatctgttcgaactcaagctgaacatccgccctaccgagccggagttggagctaattcgccgtctcgccgagctgatcggtacccgtgctgctcgtctttccgcctgcggagtcgccgccatttgcactaagaagaagatcgactcctgccacgtcggtgctgacggctccgtcttcaccaagtacccccacttccaggcgcgcggtgcccaggccctgcgtgagatcctcgactgggcccccaacgagaaggacaaggtcgtcatcatggctgccgaggatggctccggtgttggcgctgccctgattgccgctctgacactcaagcgtatcaaggctggcaacctcgttggtgtccgcaacatggatgacatgaagaccctgctttgagtgggtggtcttgtaatgatggtgactatgactatcatttaacccatgacaaaacaaaccctacgtaccgattttggatatcttcttggagttggtttgtgccatttagttcgggggttttatgaaagatttaacgatatatcgattctgtgtatgttagccttagatggctcgtgaatagaacatacatagtgctattattctcgtaactatcactgtagctagtatcattgtaattctcggcttctctactcagcttcacatctcacccaagtcactaacccgaggaacagcaaggcgtagatatcaaagaagatacaatgttcagatataatcaattggcgtataaacactagaacacgacctacctacatacaagtctcacctacataacaatcgagcccatctagagccacacacctaaactcccgaatcgtcttgctcaatatcaaaagcctcatcataagcattccaagaagcacagttatcctcaagagcctggcgatcaatcaacggctcaatttcactctccctctccaaaaactgcaacgcaaaaccctcatccgtatgccagccaatatgacaatgcataagccacgccccgggattatccgtctcaaacgccataagcaaatacccattcccattcaacatcgccgtatcccttcgcggcgggttattagtcgccacactcccatcccacggattcgacccctgcgccagaacaaagaaatcatgcccgtgcatatggatcgggtgcgtgaccgggaaactcgtgttgatcataaggtacacccactcgttcgcccgcggcagctcaatcacaccgctcgactcggtgaagttgggtgtgttttcgttattgaaaagctgcagtaaggtcgggtcttcccagaggacttgcatcgtcgtgctgttgagataccagcggaagaggttcgcggtgttgcgtcccagtgtcacgtctgttaggttgttccagtctgcggcggagacggtcttggggacttgtgggattagactggaggctggctcgtcgatgcattcgtcggggaaggtgtagggccttgttgtgggcgtgtttggactgttgccgtagtagaggatgcctcttatgttgtctgggtttgcgttttcggagcatgcttcttggggaattgcacggatccagaatgagtcggagatttggcgtttgttggctgttacaattacatcgtagcgttggcctgtgtgtttttttgttagttcatgtttcttttcatttggagggatggagctggggcttgcacatacccattccgatattgatataatccgtcgtaaacggcttgatcggcacaaagtccgccgcaataacagtaagcgtatggttatcaatcataaacttccagtgcgtatcaacagccgaattaacaatcctcagccggtacgaagacccctggttgaccttcatctggaaccgcgtgcccgtagaattggtcccattaccaaagacattcgtcccgttaatcaagccagtatccaaagtcggtggccctatcgtctgagcctccaggtacagctcatcaacagtagggtgcgaccagtccgtcaggaacagactgcccttatcgacctggtagttcgccgtagcagggccattgatcacaatcccgccaaacacgccctcccatgcctgcaggccaatgtgcgaatggtaccacgatgagccgtactgcgtggcccgccatttatatgttatggttgagcctggcgcggtgggacattgcgtgatggagaccacaccgtcgttgccgttcgtgtagttctgtctgatcccgtgccagtggatgctcgtgccgttcttggcattgtgtaggctgttcgtgacgtggatcacgacctcatcgccccagtctgcgaagatcgttggacccgggatagtcccgttcacggccattactggccggctgaacccgtctggtgctgctactagctcttcgacgtcgagccagtactcctgggttacgccggtgttgggtactatctgggtgtagtcggtgttgatgtcgtattggcaccatctggaccgtgttaggggcgtgttgcccacacagggtgttcctgttggcttggtgatcttggtggttgtcgtgggtctgtggttttgtagctggacattcacagagctagctgcgttctgtggaatggccacgacagaagcgctcaggctgaatgccaggaggagaaaagcttggaggttcatagctgctgattttacccacgtagggcacttatataatgctcaattgtctttgggtcacgaatacagctctatatagagcttgcaacacacccaaaaaagacttcgagtagaagaaaatgaatgggacttgctgatacacaaccaagagaatgatctcctatttaagccgctatcttagaagtatatcacactacgaggttgttagactaagaccgaaaattccatgtctcttttcacgaggtgacctgcatactcctcactaggatatgccaggcagccctaccggcggcgatgccgtgtaaatggatcttgtgatacacaagacgacccgacagacgaataccggcgaagcatcagagtcatagtccagctcggaagttgaggctatgtgctcagtggatacctgaatagcaagagaaaggcgccccgtatccacgccaaagacagtccaccattcaaacgtaagaagatgttcaactcggggaccttcccagattctgagtgtctatcacaccacgtgcgcactggccgctttgatattgggggtgtttgatagtgccctttctctcgtaatagtacccttgagatgatggatatcccatgtaactagggctgtgtcttagattaacaaagtcaaatcttgcaaagagaaccaatgatggaggtcggtcatcgatgatattattctctagttcgatcgcagtcagattggcatgcagggccttgcattagggttatgctccccgacacgcggtcctgtttgatcccggtgtaacctgtttcagccttagtctatacgagtgtaagcatcccacgtgtgtggcttggacattaatgttgtgatctcgcatattggatgtttctttttttgagatatcagctggtttgtccaggattgtcgattgttgcgagaatcttgacgcagaatgcatgcgagtggatcgtcgatctggttgtaacagccgggatctgaatttcagcatggaacgcagcctgatgatggcaaagggggtgtttctggtttactgggatcctgcgatcgagttgcaaattacgtatcgtcagctcataccggttcaaatcacaataggaggcttggatcacactctttgaaaatagagagaagatcagcggttgagactatagagatcattggttagttcctagggtgctgcctgcttctaatcacattgttgtctcgttgaatatgccctcctgaatctgtcctgttttataagttttgcttgatcctgacacccttccaacatattgtatgacttgttcattgcaagatgctatttctttctattctcccccttctagcctttgggctagtctgctttgcgcatccacttgaaaagcgacagtcaacctcaaccgattccttcaagctgtatgcctatggcactggcattagcggactgcccgtcttctacaggaatggtatctcagccctcccagctctcaagaaaagcagtattgactgatacatatcaccttgaccacaggtactgcccaagttgcagatgtgtccaaagtagacacaaccacaatggccgcaatgaccccaatcaactgtaagaacccaagatctccacttgataccatgtgagaaccactggaattacatctaaccacgtacacgtaacagtcaccgccgccactgacaacacctgggttgcacaccccatttccagctccagtgccacggcggacttcaccaccctctctaccgataccaacatgctgtgtctagaccaaggcgatacagcggactccaacccagttggattcactggtgcatccgcggcggaccagtcgaccacaaccaagctcagtaatgtgtggtccacatatgggggctacgtcctagtcaccgtgagcggggccaacttctacgcgagacaggctgacacagacggcatgtactctctgctttggagtagctcggctgaggcgatgactgatactataccgcttgtgctgcggactactgagcccgcgacggtatctgtattgacttagctgagcagggttgggtaggggtttggtggagttgaggggtctcgttacatagcagcaagcggtatggtgtgtggtgttgtaaggaatcgatctcggctctgcctactcggggactttgttggatacgatgttatgcagctagtaatgtgctattgtgtatcatctatttgtgttgtgttggctgcattgtgagggaggaagggggttagctagcgcttactatattatgtatggcatataggctgcattcggttccggaacatgagagtcccgtattctgtaaagtatccgatatatcaagtgtacgatcaagtgtacgggcgactaacaagtacgtagatctaatgatagagttagttatgaatcggtggcatagttagtcggctgcacaaatggagatatataactatcccgggatgtgtggtcagagcatgccagtcttgaaatcgaaaaacaatgagagccgaatgaattgacctctacagacaagtaaaactagcaaacataccaaaaaacatagattcaggaaattgctacataacctatagctgatatatgcatgagggaacgacgcggattgtctcagacaaacgagaggaatactatacgagacttattgcagaaaacgcctcgttgctgtgcgcagccaagggagagagaaagcccaacagaggattatcaagcaaagtgttggttgtgaagaggccccggcattaaaacaaagaatccagagggaataaaatggaataaagaaaaaaccctcgggggcaaagttgaaatcagacctagaaaagcaaggtaaggcagactggcaaataaaaagaacccgatgcaagcgacatttgatatcaaaagcccaaaaacaaaactccccagttctcctagacccagaaaacaccagaaataaaatgaaaacgtggtttagaaagaaaaaacaccggattcccatcccaaacccttggtaaattgacatcccgaataacaaagaaaaaaaaaagcagaacccattctacatctgccatctgtaccaaaccttctgcgagactaaacccttgttgatcgtttccgcagaccaaattcttgttcctggagctctcgtatcaaacgaagactttcttcgtctgcatcctcgtctccagtgatatgctgagtatgcctgtgctgacgcggagagagtgacgtagggccttgacgatggaagtgcttttcatacatcggagagctcttcttcgcgtgtgaagaagagggacgtgatgaaggctttcttgtcgacgctggaacaggagtggtcttgcgggccccgatggtcgaagacgtggctcgtgctgcttgtttcggagcccgggctgtatttgcatcgggcgcgaaccgatcgacgtgtcgaggttggcgagacgagtgtcgagagctagagttgggtgtgtggagagcagttgacacttccccttcaacagactgcacggcatctccctcttgaaccccatccatctcgtcgaccagcgacgtgggcggtgacaccaaagaggtgtttggcttggatgaagacacagacatagaatttaagtcctttgcttccacaggctcggcctggaaagcaggtggtgatgcgtataaagcttgattttgaggtgcctcggccgccttaggcagatgcttatcaatttgattgaaaggctcgtggtcataggtatccatcaggtcgccttgcaccatcatttcgtctccatcatgatcaaagaatactgcaggctgtgtcatgggcgatgtgctctcctgcttcgcctttttggctgaggcgggcatgtcaccctcttcagcagggcgtgctcgtttggcggaagcattcgcacgaggtttagaacgctcttgggccttgatcggatctatccgaccgtactcatcgtggatgcaacggcgctagtattgggttagtaaaagataaaaggagtaaaagaagtatcaaggggtacgacaaaccttgctcttccgacaatcatcgcacgccttgctgcgtccctttttccctccgttggttccgtcggggctcacatcaatgagacgattggcggctatcgtggagttgcccatgaccgcggattggaatctggccgagctctcgaatcgttccaggtcaacaagatgcccattgttctgaaactccgtttgtgacgcaatcgctgccaaagaattcaaagcagatacagcatcctgggccaatgacgatggcgtgctcactccagagccggctgtgaatgtattggttgcgacttgcccgttgagcaccagatcaccgggttcatctttgtgtcggcatcgaatgcgtcgcttgcgacaggcgtcacatgcaactcgcttgggaccaagacctgaggctcgttgtacggctcggggcttgggtgtagcaatatctttaatgctcgtttccaaaacaacactgaatggcgccggcgttgcacttccatcagactgcgcataagcaaggctgctggctgggggattgggagttgcaggggcctcttctgaaggccactggacagcttgtctttcggcatatgtgcgttggttatcgacattgcgttcggatcggcggctgggtcgtcctgcgggcttcttgtctgcaatagaaaccttgggattgctttcgatgacgccgggtcgagtccagaggggtgccttttcgttaccacgtttccaggcgacccaaattccgaattttctgatcatatccacgggatctcccgtacctttggggatagagcgtttgaccgcgtttcgaatgtccacggagaggactccatcgacagtatagccacccgcaatgagtgcagtccgaagcaaatacttagttaactcaagtaagccctccagttccgcctgtgagtaaaaacgtgcattgtgatggggagaacctggaggttcctggttggcgcgttcgccaaactcgtaataaattgggtattgacggtggaaccgatagttctcatcctgcatgaatgcttccatcacattctgcgggacggggtcatcctccaggtatttttgagccgtataccactggatcttttggaagaaagggtaacggaacttcttgggaactttggtctctttctcgatgttgagaatcttgatttgcatcccgtagttcaacttggtcaagaagttgccgccaataaccaaactgttttccggggtccagactgcgtgaatccaaccggacgggatcaacatggtgtctccctcggagagatccacacggtagcactccttggtctggtttccaaggaaaatcgagtcctgggcaggagagttgcaccactcctcgtacttcttgaggtgtttgtctttgggaggaataaagaagaaagtcttcttgcccttcaggatatggtagtacactgaagatcccccaaagtcgatgtgaaagtcggtatagcaatcggcaacagacatcaggcagtagaactgaactttgggatattcgccaattgccttcagttcctctggccacacggcatcttgcagatccaagtcacgcacaaccttcggtcgccggataagtctgccaagtttgctctgcgatacctccagactgataacattcctgacaggcttgtccgactcattactttcgtaataatcggcccatttctgcatgttccacctcttgtcctctccttgctgagacttgacatcgatcacttcaaccctttcttcgggtccgtaaagctctgccacagcacggacagtgagacccttcggaatgaccatacctaagaggtcttgaccacaatcgactgtttcttcaatatgactcgcttgttctgggtggttctcgagaagatcatcaaacatctcttgagaacaagcctcttgtaccaaagactcgaactctggattctccgaggaaataggttcggaagagttccagcaggcaggtatcacaataggctccgtccacccgttacctcgctcgaagtattccgctgtgaccagctcaggtttcattcggggaaaattctcaggttgaaatcggatctttccttgccgaataggctcgagatagtgatgttccaacgagtcagtagcagctttgactagaccttgattcaggcctgcgtagtcaatagctgtccgggcccgcgaggacttgcgcacaaaagttgtttggccatgaactgatcgacaatgccgacaaataaacttgtcgactgtgcgaacctcacgatcattcttgaagccggcgcaaacgatgtggaaccagtgtttgcatccatcgcaactgatccacgtgtcttcgtcctgttcctcggtctcaactgggatgcgcactagatgacatgccccacatcttgcttgactggtatcaccctcttcctcttccacttttggtggaatggatagggtcttcggcgggaattgaggttcttgaagatcggccggaggatggatcccataaggagtagggtgaggcgtatcgattggggaatgccaggctttgccctcctgttcatcctcccagacaattggcggaaaattgccagagctagtggttgggcgaattccacggatcgcaggacgggatatgaaggctgacccgtcagaccgagagcgcatgcgggcatgaggaatatcctcagaattgtgatccatcttggaattgctctggtccacatgtccaacagcagcaaacccaactcgagattgacgaattgcgtcgcctgtgtagtggtggtaggtctcgtcgatgctgactcgtttagtgtggttgccggggcggaaattagtaggccgcgcgagattgagtaagagctctgcatcggttgtcatgctttccactccagctgaatgtgggttttctgccagcatccctagctgcgggtgatagggcgacggattcctcaccgaccgtgcccgcttcgccggtcgttcagactctgcggggtcgggtggaaataagggaatcgccgactgaagggttggggaaggcgggttgggagggagtgatgtgaaggtaggactcgtcgcgagggcgatcgtcgcaagtgtgtcgatagtcgagcttgagcggccatggcctgaccgctggtgtgaaacaccttctgcggcgacatgtcgatcgtgattagaagaaagctgatcgcgatcaagactggcagctcgagcagggccgcggctgccccaagaggagtgaaaatcggtcgttgtggatggagtgataggctcgacagcgcgtaaaggaggggacggagtacggtattgcggcgggcggccgccgctgggggttgcgggtgnnnnnnnnnnnnnnnnnnnnnnnnnnnnnnnnnnnnnnnnnnnnnnnnnnnnnnnnnnnnnnnnnnnnnnnnnnnnnnnnnnnnnnnnnnnnnnnnnnnnnnnnnnnnnnnnnnnnnnnnnnnnnnnnnnnnnnnnnnnnnnnnnnnnnnnnnnnnnnnnnnnnnnnnnnnnnnnnnnnnnnnnnnnnnnnnnnnnnnnnnggggggggggcggccgccgatgggattcgcgaatgatgccgcgctcatcattttcgcaacccggtgagagtgtagattaaagaaatttaaagatgaagggagtggtgaaaagatgcgctgcggtaggtgggtgcaaagcggggatactggaccacacgggctagcgagaggccggcgcaggcgaatggaatgtcattcctggcaggaaagcatgcgcaaaacggaccgcaagtatatgattgatgtttgatgaatgattgagggagaatcaggtggtcgacggtggtcgcggagcgttgagggggttcgaatcgagcggcgggaggacaaaggcgccgagagtcgcgccgcaacctgcgggcaggtagggaagggagtcgaatgaggtccagtggccaggaatcgtttcctgccaaccggatgggaagttataattatgcgaatggatgaagcgccgagagcgagagagaagcggatgagcgcgaggtgttgaggcaaaggaggaagcgggagtcgagcagtacttggaggtatgtatacggtacagctgcggtctcctacattacgttgtctcctgccatcacatttactagaaaagattgatcttgcatatatataatatcaagatcaagaaacgctcattacaacatgcgattgtgtctacttggttgattccccccgttgctcctttctctgtagtccaaatgaagttggcgacgccgagagcgtccgtcttgataatacagtttcataccatcacgataccgtcacgtggtaagtatgggtagatcaccgcactcattgcggtcacatgacccggtcacatacggttcaagaaccaactgccactagaccaggataagtaagcgcaccgccaagccaaacctcgtggttgtccttgcgacttgctcggatcttctgtctcttcgctattccaacactgcaactgataccttgcgtatcttcttgtcaacactttcattcgacatcttctaggactttctcgtctctgagaatgagccgaaagctcgcccccgaagccaatcggtacgtgagaattactttttccatgcccctcccggattctcagcacaagtgccatttcgccatcaacagcttgatcgttgggtcgagcagatccctgacatttggaagtgactcgcgctaacctcttttttctcttttttacaggattctcttcgtcaagaacctcaagtatgtacctgatcattccgctgcttggctccggctcgattctccggcagatcagccgtgcagctccccatttacaatcgcgatcagatcgctgacatctttctcaaaagctacaacgtaacggcagagcaacttttcgacctgtttggcaaatttggtcccattcggtaatgtcacccatggtcgcgtgcgtttgaacccgatctaataccatttcatctacagtcaaattcgccagggtatcgccaataactccaagggaaccgcatttgttgtctacgaagacgtccatgacgcaaagcaggcatgcgataaactaaatggcttcaatttccaaaacagatatttggtcggtacgtgttgcatatggatctaatgagcgtccagaattattggaagatgactaactttggatgttatagtcctctatcaccagccagagaagatggtgcggacgaaagaggatattacggaaagacaagagaacttagagaggctgaaacaacaacatgggatagaatgatgtgacgaattctttttctcttccctctgcaagcatttagctgcgcgtggtattgccatgcctttactattcaatcgcggcttggttgaggggtttccggcgtttttattccctgggtttttttcttcttctttcagagggtttgatggtgggcgaggctggttctggtcgtcatatattgacccagatatgatcgtgcgaacagcacgccggcgagatctgatttcttcttatgtttattctattcaaccattactactattaccccctttgtcaattcgaccctccaatttgctccaccattgtctatgctatggctagatgctaggtgaaagggttttttgcgaatgctatattactggaagtgatgaattatacgagtgtagagctgttttcgagcttcgttggatctcagaatgtcaagctaagggtctgtctacctaagggtgccacatcactgctcagtacccactattctgcaggggtatttgaagcttggcatcgacttaagacatatacaaaccataccaagatcaagatcaaagcagatagcgaaataaagagatgccaagaccaaagacccttaaaatagccgtattgccatgcagaccctgaaagggaagtgctatcttgtcgatcccgcggggaccctgacaccgcctaggggcagtctcacttgaccctgatcctttttgttcttttccagaacctctttttttctacactcctcacaaagaactggtttttataagttcaggcttatttctactcatccgctgacccgatttattgccactcatttcgatgtcacgcatatgacgtccggctatctccgcctctgacaaaccttccaaggttactaagtgcttcctacgatctggtttccagcatatgtcgcgttccatctgaaatttctcactgttcttctggttttcccagactgaaaaaggatggacggtacgaccggctcgttggcttcgatagctacaaccacgcttattgctgctagctccctagccattccaacaccctcgggtgcacacacactatattatgatgcaacgaattcttcaagcccaggccaggatcctaatggcgaaggaggagaatgcaagctacttggtcccttctctgtgtttgttcagattgctcttggcagcctcgcattattatctctagtctataagagatggagagaacgaccgcagcgcccggtgaagatatgggcctttgacgtctcaaagcaagtcttcggatcggtgatgcttcacatgttaaacctggtcatgtcgttgttttcggcaggccaactggagattcgaagctcatacaagccgaacccatgctcattttacttactgaacctgggaatcgacgtgcgttccttctgatcttgttttgacttcttttgaggagctgctggctaactgatagacagactacactcggtatccccattctgatcctccttctccacgttctcaatcgcttggcatcctacacacctcttgcaaaccccccagaatctatagagtcaggaaattatggccagcctccacgcataacatggtggctcaaacaggccatcgtttacttcatgggattactcggcatgaagatatgcgtgttcttcctcatcgagctcttgcctttcatcgtcactatcggcgactgggctctaaggtggacagaaggccacgctgctgtccagatcttcttcgtcatgctgcttttcccagtcatcatgaacgccatacagtattatatcatcgatatattcatcaagaaaccagtgtcacaatacgtggtggatgacacagttggagattttaccatagatgatgatgctcatcgccgggaggctcttcttgctggccaggatgagtcggattcagctgattcggatgatgaagaagctgggaaatctccgagaacaacctcgcagccgaaggctactgcagacgctctccagggagaacgtttacttcccgaggatgacaatcctgttcctccatatgaacctccgagctcgagtggcagtggcgaggaacgttacctgaaagctagttcaacacagcactgaatgttgctttgcgttcttgctttggaagtttcatatttgctttgttttggtgttcatggttatctttaacgtgtatacgattacttcgttcttgcatattagtatgatttttctcattttcctgctatctaatgtgcatatatctaggttgtgcctaggtgtacttggataacatggaactgttactcgtattcctcgttatagtcagaatcaacctatccagagcgacattgaactacatggaatatctcttattctatctacttgcctatcttcccccttctatgttagcctttttactctcatcaagttcatttaactagaggactcaaggatgtcaaatgagtctatagctgtgcatggcctcggattctggtttgttgccgcaaaattaaggcaacagtatatgccgccttccacaccgctttgatctgcccattctggaaaaatcaaagaagaaaaatattcaagctccgcctgaggaagatttgcagcctacaattgcattattgcattcgagtataaattcggtgaccgagtctgcaagaagttgtgcttgattggcagatatcctcacaccaattaccatgcctaacgtagggctaaaaggaaagtccaagcggacgaccaccgggtctccgttcgagaacactacggccaatatccgcccggaggactcagatgtcgagatgggcgacgaaacgagctcagatgaggacgatgtgcccgagaaagatgaggcagagaagaagctagagcgtctgctttttggcgacgatgaggggttcatgggcgcattgaagagccagcaggaccgcgaggccggtatggctctcacactgcacagtgatgatgagagcgatgctagcgaagacggggaggaaggcgagggccgggatttggctgctctggccgactcagacgtatgcgactccaccccaatgcgttcgcagatcgagggcttttgatctaacaattctgctttcatctagcttttcttccttgactccggtgcaccccctaccacagatttcatcggatcaccggaaaccccgtcggacgccgaggacgacgaagaagaggacgaacccgcggtctggtacgacagcgatgacgagcgcctcgccgtgtcgctagcaagccaagccaggctgcgcaaactgcgcaacaccgaagccgaagatgtagtcaacggcaaggaatacgcccgacgactgcgaagacagttcacacgcctgcatcctacaccagagtgggcgacgccggagctcaagcgccgcaagacggactcggacgcagacagcgaggaggaaatcaactcggacgacgagaacgagaacctctctgtgcagcctctagccaagctcctccaaaacgcctccgacctgacgcgcatagaagacaatgcgcgcggcggaaagcgcaagctgcgccaggaagtcatcgacatccagagactaaaggacatcggcaaatcccaaccctcctccgtcgactccctgtccttccacccgcactacccactcctgctctcctccggaccagcctccaccctcttcctgcaccacatttctccctccgcacccgcgcccaaccccctcctcacctccctccacatcaagcacacacccatccacacgtccgccttcgccgcacccacaggcaacaaaatcttcgcctccggccgccggcgctatttccacatctgggacctggacacgggcaaagtcgacaaagtcaacggctcctccgaccgcaaggaagagcaaaagtccatggagcgcttcaagctctccccgtgtggccgcttcgtcggcctagtcggcacagcccgcaagggcggcggtctgatcaacgtgctagacgccaacaccgcgcagtggatcgcccaggtgcgcgtcgacggccgcggcggcgtcgcagacttcgcctggtggtccgacggcgagggcatgaccgtcgtgtcgaagaacggtgaggtctctgagtgggacggacgtgtcggccgtgtcgtggcgcgctgggtcgatgccggtgcagtcggcacgacggttctcagccttggtggtcgctcgggccggacgcagctgggtggtgatcggtgggtggcgattggttcttcgagcggtattgtcaacgtgtatgatcgtcgcgaatgggcggctgcgtatgcgaaggcttcggctgctgagaaggattccaccgctcaggctggtatcccgcgtaaccctgacccggtgcgtgtgcttgatcagctcactacacccattagccatttggtgtttgcgcctgatgggcagatgatggttatggcgagtcggtggaagcgtgatgctttgcgtcttggtatgttttctggctctgcttgtgggttgtgttttgtgtgttcttgctaaccttgtttcttttatagttcaccttcctacctgcacggtataccgtaactggcctacttccaatacgccattgggtcgcatttcctcggtggctatttcaccgaactcggagcagttggctgttggtaatgagcaaggtggcattcggctttgggagattcggggatagagggcccgtctgaataaaatatttatgttttcttgtcatatatttactaccccgatagtggcacatgcttttcgttttgttgtatagtcgccggtaaatcgacgtggtctccgggtataaagttagggctaagtccatgacctaaatccaaggcatccatccaatgactgattctacttctgttcacgggcgcatgattaaaaggaagctaaggtaatacctcagggtttgacaaagtatgcgcgcaatattactttcgtagtagaccattcattttttaaagtcatagctgtctagcgagaaacaaaaacgcagaacgcccagtatccaaagagtagagtaggaattaagccattatacacgccatagcacatgcaagccgtgtcaaattaaatgaagggtcatggtctcattcgtgcgaatgagggagggatctatactgttggccttggacaaggattttcagtaacaaaagggtatctgggggaaacattcaagggaaaaaaagaggaaggaaaaaagtaaatagttagcaagacatccccggggtgcttggctaaatttaggctgggtataaattggatctttcgaagattccgacggggaaagagggggcatgggcagataattcgtaaccgtgatcgatgagggcttgaatggatgccacgaaaggctactctcccggtctgcttgcgccccaccgcttgggtcgcttgccttgctcgacatagttcttgacgacacagggggaacgatcgggtccttgacacaccttgtgacggttgaggtgtttgaacttcgggccaataggtccgttcacgaaatggtattggcctgcaaatcgatactgacggggatcacttagtgggtagaacttgtcaccccagtggcccctgtaatggaaccattccgttggcgcagagggggtgaatgtggacgcccgcaaatgttcgttgtcaaagtcatatgtgtaggcttgcgagttgaggagaggatcccatagtggaccgcgatcagttacatcgtgcagcattccccagggaagaaggtaatcgtgcactccggccgtggcatacatggcatgactgccctcggcagagtagatgacgggctggcaaggtatattagtaaggttatccttgccgcttgtgtaattgggaactcactcgttgtccgatcttctcaacggcttcgtagctataagcctctccgccctggtgggcgctgaagaagagcgctttcgggttgccattgtggaatcgcaccagacaatgctcccagtcgccaacgtgattgccaaaccggacgttggcgacagtgttaccgaggttgaagctataaaagtagaaccagaacgcatcgacaattccgttgcccttgtccatcaccaccaggattgcaggggcatcgcttcgaccaccggcagcatcctggtggatctcctctccaccgtaacgtcgtcggatctcttctctgagtatttcctgagcttcagaatgttcgtcggcgtccgattcggcagcttcttgttgcaattggtaataatcataccacttggcgcgatcttcctccgtgtcgccagggatatcaccgtcgactcgaccatcccaatcagcccaggattcttctttatcgtccccatctgcttgcgggatattcttatcgccttccagccagtgtggacgcgtctgcgcatcgtcattgctcgtcaaaaaaacgtgccgtgggccccactggttcaactcatccagatcggccagcgtcggatggtcccattgggcttgaatcggggtgtaattcagggtcggagtggtgtggtacaagtgctctgcgatatcccccggccagaattgctcaccggaataaaggtgaacgagtggggcatagtggaaaacgtagtccgggatctgccgccgagcccgctcctcggcatcccactcggagtcactagcgccgctaagccagaaagaccgccatggtgcctctggctcggcatcttgcgctttcacccactgcgccggatcgcgatgtccaaatgcgccgtgaacggtttgtatatgggcggcgccgcagacgcccagccaccggcaggatttgcggtcgaaccacgagcgcgagctcgcaatccagctccgctcctcctcgtcctcggtagaccagacaaaagcgcccggccggaggatgtgtattaagctgttgatagacacatacgctatcagagtcgagagcacgccaatggttgccttggccttccgggtcatctgctggagcgagtcgacatagactgtcaaagtagaagaactatgtggggtatgttcatagactgcgagttcgggaattccagtcgaggctagcggttcaatgcagtgggattcaagtgatagggctgcagcgggtgggcattccccagggactatagtgggacgagagataacaaaagttgagacaaggagggcgcacaacagggccgtggggatacctatataaaaacacacggtccctttgttagcgagcccgagaatttcccgactaagaagacaagaaggtaaaggaagaaaaatggcataggatgatccaatatcgcgagctagtcagaccgggaacctgcggaaatgggtcgaaatcatagccaagccggatgccatataccgagtacatgagcttatccgtcgaaagccggagcggaagggacgggaacttacgaagaaatgatcccattgctcccaagcgtgcagagtggaaaacgtggaagttgtttaagttgattaaaaggcgttgcggtgagatgtgggctttttcataaggctgaagccaaaggtctgggcacaactctcctcccagataagactgtataatgatcctggatacacagccctaatgtgacccttcataatgcattgtgctcgagaataaaatgactcaattgtccacgaaatcccctccatctgaaacatgaaaacataaaaatatgcgcatgttcaggccgttttcgccaccaggtcccataatattctgttgatttcgtcccaatcgggcaggagggggaaaaccttggagggttcaccgcttgcagaaaaagctgactcagattctatcttatctccacttgacagaccaccgggcgcatccagaccttccaattcgtcattgatttgtcgatatacaatggtggactccgaatccgatggagaatacgagtatgaatatggcacggagacggaagtgagaatcatgagcccggtctgctctcaatggtactaatcatttgacagagcttttatctcaacctagacctgaccgcccaccatggtccagtgcgccctccacgccgtcgcgcaaaggatacagggtccctggaggatagccaaaaccctgcagaggacatgagccaagcctttccgagcgaagcttatcatccgatcgagagcgccgagacaggcagtctcccgaacgagcggatccaaattctcgacctccacacgagcaacccgatcatttcatactacaatcaaatgttcagttgctcctgggctgatcaaatcggcactgagctagtttttgtccgtccgggcacggagacagacaaccacttccctcaaccgctacaccgtggagccaactacgagcttgtagccgccaacagcgtgaagatccttggccggaaggcacagctcgtccccagtgctgggccaggaccagttcaaggctctactgaggggccctcaagcacaggacctaccgcggagtccgcgtcttctcagggcgctgaacccctcggcgtcccccgtcgccccgcagcgccatctcaccaggcgcagtttctccacaggttgcagcagatcaaaactgccaagggagaaaccgataccgttcgcacggtcatgagtacacgtcggaatgtgaatatgacggatagacagcaagggtgggcccggaccgaggcgcaacttgccgaaatcgagcggctcaacgaacgggctttgagaggagacttggaggccaaggcgactctcgagctgctgattcaagagctcaatcctgacgaggtcgaggcagagtctgagtccgactcggacttgacgtctgacagcgatgagcttacttcatgaattgcaaatcgacaatgtgctgatattgggtctagctgtgtctgtgaatcatccggagcctgaacagctacctgatgtcggtatctcagtggacctacgttgtagtacatagccgaattgtcccgccggaaaccgcggaatagcgccagcgaggagatattgatctcctcgcgggaagcaaaaaccctactcccgtgatggagacacagctgaccctcttctctgtgatatcggaggaatggcatcacaacggtcaacccgggacatcctagcaaagccatcaccggtgacaagccccacccagctcgaccgagcaaacagcccatcggtggagccatctcagctacgctaaaataggtggatctactccgtagagcagtaacgtcattcacaaacttaatgtaggaatgacatcccttgttccatttaaaattactgatcacgcaaaccatctgtgaacgataaacaatgatagaaacatagattgcgcgaaccaattgtatcctgtatctgccccgttcgacatctagaacatgtgcatagagcacagagcaggttgtgcgactccattaacttccacaatgctagactggtgacgtcgtgatcggcatgatcttcacatgcacaagtagatgggccgttactcgcatcggacgacaggttcctagctgtgtatcttgtatcatgtacaacatagtggctactccccatcgccggcgcacggaactactgttctagacaccttctccgactttccgaggtaaagtgcgattaccggacagcctaggttagattttagaagaattaactagttagaaaaagcttagttgtaatgaaggaattatgttgcaatgaagctagtgtctacaaagcaaatgtatacactggacaatatataatagtaagaaaagatgtcgagtacatatccatattaagggtatacaggcacataatgaaataagaaaatacccaattgatttctgattcggaaagcccagggaaaaaaaaaacaattataacaccaattccccagacttttgaaaagcgctccaatgcgcaaaaccagaaccagataataaatgcccgccaataaacacgctaaatccaagaggcgacatgtaaaaagaaagacaaagacaaagacccaaagagaaagacataaggctaataagcatcgcggatatgaagtcgaagaacgagtagtaaaaaggaaaaaggaaagaaagagaacaacggacaggacggggcgaatctgcccaacagtgccatgcacgcaagaccattatcgggaatattagatgatggtacaatgatttctcctgagaaggtcgagaaggaagaagaagatgtatcgaagaaagatgaaagatgaaggatggtatgatcgaaagccgaaaccgagaaaggagaaaaaggtgaaatcactccaggtttaggctggggatatcattgtaggaagccgtgcccttggagaaggcgacgggcgatgggggaggcgcggggggcatgccgtcgatgaggatcgagcgggtcttctctgccctttgggttgaggctgtcatgatggcgcgggagatgtcttgagacatggagaaggaaggtggcatgaccggggtggcggatttggttgcgacggaggccattgttgtggatgtatagggtttggtttgttttggtgtagagagatgatttagacttgaggttcaagtgttttaggtagggtgaagatggactgttcgtttcggtttacacttgggaaagtatggggtagccagataagcaatgtagatgggctgaggttcgagagtaaatgtcagcttctgttgcagagtgcttgtgctttgtaggctatagatggactttgcggctccgatgttgcccgagtccggccccggtcccgggggatcgggtgtgatgtggcaagaagtgacgggagttaaacttacaaggagaaaaggaatcgggttcggctatttgcgagatgtaatagtaacagtaagagtagaagtggtgaggtggtggttgagattatagatttcttggagatgtgaagaggctgaacttgagtattgcaggtatagtatgctccgtagaagactcgaagacaataagagcgaaggtgatagcaaagctgttgacagtgctgggtataataatcgtaaaggtgagtgagcagagaaaaggagcaagacgatttcagggtcaaggagtcgtttatatttttccccttctcattaaaaaataatataaaaaaagaaatgagacacccaaaacagacatccccgtaaagtgtggaggagtacattccctggggaagcacgaaagtacccagtacatacacgcatacctggccaggcctgatgcttactccctagagatctgccatgtcgattcgcctcattctaaacagcccaataacccagttatcgaggtagggggacattcatcggaataacgggagccaaacccggaaacaagaaaaaacaaaggagataggcctgacgcgttagtgtggggaagaaactaggggatgagaatcgatgaatcaaccatttgatacctggttatttcatatgtatgtcctctgtatgtattgcgttattgacattgtccattgtctggtgggaactactccgtagcgaaagccggttgaaccggttgaaccggcaaagctctttacagaactaaaaactagtgctacttaagcgttgttttctatgattctagcactccgtacaccttctagcgttgcccggagaaaactcgctttcagacctcggcacgagagcggagacgacgatcctttcgagaacaaataccgtggcccagcgaccagattgccggggttatggaagggggtttccccgttgcggtgtaggagatcggctccagggtggcgacaggaatcggagctattatttaatagacctgcaatatccatggatgtatacatccggggaaaaggtgtgatcggatatgtatggagttcaacaactgattttcaccgtctattggaaatacgccaatcaggatttttgttctattttgacgtgctcatcaattcccaaggtgcattgtcaatcaggatgatccttcaaaaattgagacgttgagctggatatgataaaaggggctcaagtaccggtatacccacctatagtttaactccacatccgtctgataaaacaacacttgtatggaatagtatattgtacagcgccacagatagacctgtaatagtttgggagtatacttcgctaggggccgaaacgtctggggcacagatcaaggttgtttgagatgtgttgattttgacgtacggagtactccgtactccgttctccgatgccaaaggcttcagcaattcctgattcacagccaccttggtaaattcaggggcataaacgttgagctgcaaaagtaccaaaatccctttgacccgttctaccgccgatcgacgcgaataggggactccacaattcttcttccccggattcaaggggcgagtacggagtacggagtacatacggagtagtgactatttaatatgcactccactgccacatattctcacaatgtgacgttatctgggcaaggaagagtgttactctcagtcgtagaatcagaatgtccattcctgatttcttgatttcctgggtaccgggtctccgacggtgaggctgggcgtgttcgggaatctcgaaacccctttgatcgcggacttcccgtggtatctgctataataatagcaacactatattactacatcatatcgtatcggcaaattccatatgtctgatatacttgcatatggaggcgcaccatgtatcccaaagatttagataacattcttttcgcgacgtaagataaggtctcggcctggtgacttggcctgttcaccgctcgttgagaggtacttgtgatttcaatgatagattgtagcgatctgacaaagaggggaaatgacgagttggctgcccagtgtgttgtgagatacaccattttcgacatttgtggtgccaactgtgggatggattcgtcaggggcaatatgtacaacacatcctatgcatgattatgagctgacgtgatcgtgggctgctcgttagttattcggactacttgagcataagaccaatgttggtctacccaataccgcagttaccgacagatgggatatccttgtaggcgccagacgtataagagagacactcttggactcacctataatagtaccccggcgtactcgcggacccctccagccaaacaggataaggcgaaggcagggctgatttgctcgatacgcaggggatgttccgatcggaaaagatcgagaccctctgaaaggtgcccgattcacagggcactgacgaattgttgagtttggaatcgcgttctatcctggcccttgcacgtcttcgaagatctctaattataaccccttgggcttgtacccaagatcgatcttctaggaacgagagccctttatctgcaactctgaactctatgccacttccaaccttgcagagaatatgctttcaacgacgcgacctgactatcttcgagatgatcttctgacctgctggtcccgtgccgtgtcctgtcttgggacttgactcacaaggttctccctaaatgccaacacttgggaaatatatacagagagctgtgaagtggcagctgagctcgtgtcggatggtgacaccaatcaggcatccgcaggccgtgagaaaaacggggaaccagctgtatgtgtcagacgaactaggagaacccgtgaataagtatgttgtacggagtaaatgaagagaccttggggatcggaagaccatccgagcgggatctccccagactcgagaaatctagatcaatgccctgaggctattttacgtcacggggcggaatatcatttcccctagaggacagcaattacttcatctctcggtggacggcgggctcttccaatcgcaagcgcgccgagagtccgccatcacgtaaacgccccgccaggaaattctggagatgcgtaaaagaaatgcaattgatgtagttgttggggtaaagacgtgccaatgcgtcttttctaacgaatgacagggtgaagctacgagcgtggtagaagatgttgatgtttaccccgcaagtcatccaggtaccagccctggagagcccctccggttggagatatgacatacacatgtaacatgggagatattgatagtctatcaccggctttcttccaaggttgtcaccggcccggcgacattcgcaaagattgcctcaaattgcaattggccttgcctcaactggtcaaacacggcaaactcctcttcaatggcgaaaatcccccggaccgaaacagccaccagtggagctgaaagagagtagggcagtcgatcacgatgcgatctggagcagcgccattcgggctggaacacggagaatgaggcatttagcaacccaaaaaaaaaaactcggaagtttcttatcctagggtgggttcatgacacattgcattccacgatgttcggcagcgatcacatcattccctgtatacatcatccatgcaccctattaagacatctcaggtgaccccccgtggacctgctactatgctcttttcagcttccagcaagtctcttccaggtcacccgctcacctctttttacccctgttcctgtcctcagccacgttccagactgttgaggcaattcttttcgtctcatatcggcccgcatgacgcagcgggattttgctatcggcttgagttcggaaggaggggcgatgagctccaatcagcggagaatgtatcgccggctgttagtcaaagtggagagagaatgatcgttttggggtggaacaaagtggaccggcggatcttaatcagcttcgagacctctatacggttgaacctccccgcctattatcggttataactggtgggagcgggacgtaataataatagaataactaatggaaataagagagtatgtattaatagagacagagataatagggcttactagggattagccagggacgaatagagcagcactagtaaaagctgagaatcaggttttgttgtgtataaaagactagggttccccggattttctgaatccttctgattcccatccattctcatttctcaccttcagtccatggcgacgattggtgatcattgtatttgccagtaagtcttacagcgtttcttgtcctccttgcttgttatcttcgacctaccgagataagcacattctttgtgtcgccttatctcatctcacacgtgccagatgattcatctgagctcatgctgattgccttatagcttctgtcatcttctcgctcttacgtgttaagagatctgcctcacatactgcatcatgtcgtctccagtaactaccccactgtcggagactcccaatggcactggcgcgagcttgcctaatcgcccccagcctaagctttttggaagccaggatggaagctccggctccggcacccccatcggtttccagcgctttcctccccacaacaagcacctagatcatgccgttggaaacgctttgcgacaaccgtccccgcagcccacgcacttggggatccccggtaccccgcaccgtgtgctctccgaggaggacccgggctacattgcggctacctttgagggcaagcagaaacagatggaacaaggtcagtggggttgacaaatgtggggataatgcaattagctaattcccagcagttatggacatcttggaggagaagggcttcttccccagtgactttgtcatctccgaaaccacctggttctataacaagcttggcatcgacgatacctacttccagaccgagtctgtggatgccatcgtgacccagatcctatccctctacgccgccaaagtcgccgcctatgcccgcgatgataagcagctggagattcgtctggataaagaggccgaggaccatgcggtctacatcgataccagcaggcccggtgcggtttcggtcgatggtccacgctacgagcagcgcatcgacgagaagtacgtcaaccactccaaaggtgccaacagctaccgcgtggagaccttccgctcgccgagcactctgccgggcgacaacggccagcagctccgctgctacttcgtgtacaagtgccagttcgccaaccccaacccctcaccgaatgagaccaacatcgatatcattggcgagaagcgcttcttgcaaaaggccactcccaacaccaaggcgatctaccaggaaatcatcgccacggccgttggtcgctccggtcctgtgattgagatgttcgagattgagggaagccgggaaaagcgtctggtgattgcataccgccagggatccgctctgggcttgttcagtgccctgtcggacctgtatcactactaccgcttgaccagctcgcgcaagtacctggagaacttctccaacggaatcactgtgatttcgctctacctgcgtccctcggacaagtccgaaatctccgccaaattccctcccattgaggctgccatccaccagatcatgaaggaggtctcactcttatactgtatccctcagaaccgcttccagagccactttgccactggtcgtctgagcttgcaggagacaatctacgcccactgcgcgtgggtgttcgtacagcagttccttaaccgtctcggttcagaatacacttcgttggccgctcttttggatagcaacaacagtgttcacgcagagttgctctccaagatcaaaaagcgtctgcgtacggagacattcaccgctgactacatcttcgaaattatcaacaaataccccgagctgatccacaagctttacctcgacttcgccaacacccactacgttcagacccaggagtctggtgatgacttcctccccaccctcagttacctgcgtctgcaggtcgacgaggtcctcgatggcgccaagctgaagcagctcatccgtggcaccgcccacaacgagcacgacgagatggttatgacctccttccgcgtgttcaactcctccatcctcaagaccaacttcttcaccccgaccaaggtggctctcagcttccgcttgaagccggacttcctgccagagcatgaatacccccagcccctctacggcatgttcctggtcattagctccgagttccgcggcttccacctgcggttccgtgacatcgctcgtggcggtatccgtatcgtcaagagtcgaaacggagaagcatataacatcaacgctcgctcgttgttcgatgagaattataacttggccaacacccaacagcgcaagaacaaggatattcccgaaggcggtgccaagggtgtcatcctcttggatgctgaccaccaggacaaggcgcgggtcgccttcgagaagtatattgacagtattctcgatctgctcctgccccccgtcagccccggtatcaaggatccgatcgttgatctacacggcaaagacgagatcctcttcatgggtcccgacgagaacaccgctgagctcgttgactgggccaccgaacacgctcgtggccgtggcgctccctggtggaagtcgttcttcactggcaagagccctaagttgggcggtattccccacgacgtttacggcatgaccactctctcggtccgccaatacgtggttggaattcagcgcaagctgaacatcgaccccgcaacacagctcaagctgcagaccggtggtccggacggcgatctcggatccaacgagatcctcctgtccaacgagaagtacggagccattgttgatggatccggtgtgatctacgatccgaacggtctgaaccacgaagagctcatccgcttggccaaagcgcgcgcgatgatctcacactttaacatgaccaagttgtctcccgagggctaccgcgtcctggtcgacgagaagaacatcaagctccccagcggcgaggttgtgcagaacggcatgatcttccggaacacctaccacttgcgcacgcaggagaagttcgatttgttcgtgccctgcggtggccgccccgagtctatcgacctggcgtccgtcggcaagctcatcaaggacaacaaatgcatcattccttacatcgtcgaaggtgccaacctgttcatcacccaggatgccaagctgcgcctcgagaaggccggctgcatcctgtacaaggatgcctccgccaacaagggtggtgtgacatcttcctccctggaagtcctagcctcgctgtctttcaatgacgaggagttcgtcgataacatgtgcattgacgaggatggcgccgtccctgacttctacaaggcctatgtccgcgaagtgcaggagattattcagtcgaacgccgctctcgagttcgaggctatctggcgcgaacatgcgcagactggtgtgctgcgcagtgttcttagtgaccgtctcagcttggctatcaccaagcttgacgaggaactccaaatgaccgagctctgggacaatgttgggctccgtcgttctgtgcttggcgatgccctcccgcgtcgtctgttggagaagatcggtctggaaaccatcttggaacgtgtatgtctcccctccttctcttcttgtatttgaacctccgctaataatcccaggtccctgagaactacctccgtgccatcttcggcagccacctggccagccgcttcgtatacgagtacggcaacaaccccagccagttcgcgttcttcgacttcatgaccaagcgcttggcgaagcttcagtaagctgttggaattagacattcctgtgcgaaagtgctagttttgaaactgttttgtcattatttctgtttttctttttgagaaagacttatccgggtcagcgaaatacttaatacggaacaaaagaagacctgttcccttgacgaatgtatggtttaaaaagtttggcgagcgagaacagagagaggccgcttgggcaagatgatccttggaatccaaattcctacccattggaactgccatagtcctacataactctatcatgcaaattctattatattacaccaacccctcccaatgcttacttccatctgttttgagacgacacagtctcagccataatcagcacgatattcactgccttttaggatgttagtatatgtcaataggacacccggatcgtccttaaaacagaagaactcaccaataacaaatcaactccctcagatacctcaacctcccacctcggcctcaacttcactttggatctactgtagtccatcacattgtgtcgcgagatatgcatgatcttctggttacccatcatgacacccgtacccgacccagccagctgcttcactttcagctcgacttttgcgccgggcgaagcattagcttcaggacggggactggttctgctgctgccgctactgctgccgggactggaattggcattccgcgacgcagatgtagacgcagacgaaagaaacggtgaagccggcgccggctcctgcggcggctcaattgcatcgagcagatcgcgcaaggaattaggcgagttccggcgaacggaggcgtaggagggaaggagtgttggtgctacaggagcctgaacgggatcttgacgtgaatgtggatgtggatgtatatctttctcattccccgcatccccactcccttcttgacctctaaccccaaccccaaccccaacaccagaaacagcactataaggcggcggctcgtcatccgacaccgccaatccactcccactcccactccctacacgcctctccctaaccgccgacgcaagcgcattcacaaaccgcacatcaagcctaaaccccccaccaaccccaatcctcgacccgggcccatccgtcacccacggcgtcgaagcaaccattaattccgcctgctgatcagggagtcgggccacccatttccggatcggcagccacgcgcgtcgcaagacgagcaccggcacgtcctcggcatcgcagactgtgcgcgtcatgtttggccatggtttgccgtacacggtgtagaggaggaccgcgcggttggggctgtctggggtttcgtgggcgcggatgcggtggatggtgaaggcggaggcggtggcggaggtgggggctttggggtgggctgtggagggcgggctggtgtcttgagttggggttattgttaggattgttgcggtgttggctagcaggtctgcggggggagagaggaggtggtggggttggagagctattggtgttgcgggggatatgagggggttggtttttgatttggagttgcgattgggcattgggattgcggtttggtggtggtggtttggtagcttggtggttgatgtggatgttggagggattggttatatcttgtaggttgtgtatatagagatctaggaagttgaagtgatgttgctgagtgggggcgggagtgccggatacgttgtagcactgaggtcaccaattaggaatacagtatatataaacagtcgaatacatcagggactatgtaaccttccatcgcaagtctcgtgctcccctatgtatacaaagaagaatgaagctattcgaacacaaggtcattattatctacggacataacggatatagtatgttgacctatctaccgaggcatgatatataactacaccgactacggagtactacttacatctacgcctcccaatacatacctcataatccattcaatatagttagcatgtcttcaatcgtgccaattttagcacctctagacccaattagaatctcaccacggacagatccttcaccgagtggaacctgctggaaccaggcccacaatatgccgccgaccgaggatagaggcgcagtccagaccggggaagaattatgcgttgaaaggggcaattggaagaaaatcagcgcgagggagttcgtgcagcatcattcgactagtgctgtatgttctaaccaaaggagattagccatgttagcgcgggttagtggctgggaagcttattttcgtctatctaatgccaattgccagatatcaaatggcagatgtcactccggacgtgtcaaacatggatctgtcagtccaccagcccatgagaatccagtacgtatccatcgtctgcttctagttagggcatgccacgaatagatcctccatattacgcgttaatagtgcaggcgtatggccataactgcaatgcataaatggcactacgtggggcctcgaaccggtttctcctcattttagacaaaaggaacccacttttccccgatttcattttctttctttcttctttctaaaatatgaggtcgaaccgtttgtggggctgttactagactgccaagttagcatcctttgctatgggggtctgctaaaggagaacttgccctctgacatttccctagaaaacgagtcattgccttccgtccatattcgggaggattcatattcgccgcgtcgtgccatgtcggacgcacaggaaaaggcgccgccgatccctcctcatccttctgcggggactgccgaggcagaccgcgctgaaggcagtgatcacaatgtcgattccaacgcagaaacccttcgtccagacgaggcgcacccggagcccgaaacactttaccagcgatgtcgggcagcaggccggcggattcgcaatcgcgctgtcatcatagccgagatgctcgggcgaccacatgaaaaaggggatgggttgaattcgccaatgttgccagactactatgaaacactagacgatatccgagcatacgaggcccgccaggcacttgatgaggaagcgcgcctcccgggaacagactatgattcacaagcgcgcctcttgatggaacaaatggggtcccagtccaggctacggcgtccacaccatatcaaagaaccgtgttccgggtcgacaacgccaggaacgccagggactccagatgagtcggcaggacctggcagtccacccggagggctcttatcacatcttctccgtgtatacgccgacaacctccacgcagcccggctgagtagtatgtctacagcgtcagaacccagcccggacgcagaacccaaaccggacgcagaacccatcgcattacccgacacaacgacgggtgaaaagaaagacaagtcgaaatggtacaaccaccccaacaaaccctcccacaactatgcttcctccctcgtcaatgcatccatggatttgtgccgggtcgcgctccccggagccacgggtccccctcccgcgactcccaacgaacgaaagaaggaaaaccgcaagggaaagaaaaacatcaagctcaccgtccacattgccgccattctcgcccgccagcagtacatcatgcagctgtgccgcgctctaatgagatacggcgccccaacccaccgcctggaagagtacatgatgatgacatccaacgtactagacatcaaagcgcagtttatgtacatccccggatgcatgttcatgtccttcgacgaccaggtaactcgcaccaccgaggtaaagatcgtccgcgtagtgcaggggctggacctctcccgtctcgcggaggtacacaacgtctacaaacacgtcgtccacgacatcatcagcgtggaaaaagccatccacgagctagaccagatcatgcagcgcaaaccgcgctataaccgctggctcctcatcctcctgaccggcttagccagcgtcaccgtcggcccatactccttcagcgcccgccccatcgacctccctatcatcttcatgctcggctgtctagtaggcttcatgcagtacgtcgtcgcgcccatctcagcgacctactccaacgtgctcgaagtcaccgtcgccatcctcgtctcgttcatctcgcgcgcgttcggcagcatccaacataacggcgagcgcgtcttctgcttctccgccatggtgcagtcctccatagcaatgatcctcccaggcttcgccgtgttaagcagcagtctcgagctgcagtcgcaccagatgaacgcgggctcgatccgcctcgtcttcacgattatctactcgctcttcctcgggtacggcgttaccgtcggcacgaccatctacgggctgatggacaagaacgccacgaacgaggcgacgtgctcgcatctgccggaggtctggggcaacgaatacatccagcacttccccttcgtcgcgctgttctgtctcttcgcggggctgatcaatcagtccaagccgagacagttacccgtgactatcttcatgggtatgtgcggctacatcgcgaattactttagcacgaagaagctcggcgcgaaccaggttgctaataccgtgggcgcgtttaccattgggcttctggctaatctgtatagtcgggtgtggcacggccatgcggctgctgctattattccgggtatattcaccctcgtcccgtcgggtctggcgtccagtgggtcgattatctctggcttgcagtatgccgaagctgttgcggcgggtgatgctactaatagtgcggcatctaatagctcgcttaccgcgctgggatacggcatgatccagacggccattggtatttccgtcgggctgttcatctccgatctgattgtttacccgcatggaaagaagcggagtggaattttcagtctgtagacctccatcttcgtttatattgtattatttgcattagcgtcttgattccagagcgaaaaaagcgtcccatttatactagatattaataccgaatctcaatctcaatgtcatgtcacaatatcaacatcaacatcaacatcacaatgtcaacacagcccccaaaaaagcaatccaagcaggcaaatccgcaacaaccatccgaatccggtgaatccccacccatcgtcgcatatcagccgacgcgcccaccccactctcgcccaaatcctctctaacagcaacgttatccacaatcctcttcaccggcccggcgacaaacggcacgaagaccaaatgtccgaccgcgccggctagccccacccagtagaacgccgtcgtctgcagcggcttttgcgggtagtagcggttcaagaagagcgtgccggccgcggaggttattgtgccgaggttcagggccaggacggtccatactgcgcggttgaagacgtgggagaaccattttggtaggactttgtcggatgtgggttggagggagggctggaggaagcccgtgttggttgttagttctaggatggcgtgtgcgagggtacccgtgctggttgctaagggtagagtatggaggaggaggtatgggtttaggattagaccggaggccattttgattattaggtggtgagggtggtgagggtagtaaggtgggatttagatgggtgagaaagggagtaagtgagacagcaaggcgatatgcatcaattggggccaaattgactaatatccgtgggctggtgggttgatctcaccttcatccccgttacgctgacaatggccagccagcttcaaacactctttcaaaagcattctcagatatggtgatttcagctaggctgaaaatgatggctcaccagacataatggaagatgactacagcctgatgttgaatgtttgtccccttcagtcaaacacatacttcatctgatctcaacggctctgtataaatatcctcagcatcatgctcaacttctattccttgtcaaccttctccatcaatttggcttatattatcactggtccatcaaatatcggcctgcccattcagcttacccttattctaccaactctcatcttactttctctcacactcctctcccaaaagaccatggactgaggagagtccctcaagtcttctctcacgaggaccttaatgtccatgccaaatcggcatatctcaccccttacatatatttctctatataatcaggtgagttcaaggcctatgaaataccatctgaactggaatagctaatccctcccagcaatatagctagtgcaaattcctccacattattgacgagaaggtcctcctacgcatcagacgcggctacaacactcccgccgacaagctagaacagcaatataccaaccttgtcatggtcactgagcgcgtcggtcggttggcacaccgacctgaacttccaccaacctggaggattcaccccgtcatcagcgtgcagcaatgagagcctgcgacgacggcagatcccttcggcagggaggcgaaaaaagtgcacgcagcctatgccgagcggttctggagcgtctccgatgttgacgccgagactgtccatttcgcaaataccgtacggaagtgtgctatatataatccgtgaggggaatttctcccgtgacagacatctgatgtggaaagcaaagggagctgaaatataaccgagaggtatatctatatatcctcaatggtaaggctcaaccacgcagcgaaaaacttaaccaaagccacacttctaactatcaaaacgcgcagggcgatcttacctgattatcgaagaagcgtctcaaatggtcgactcacaagcgctaaatggtatcatgcgcaatctgaatggggttgaaaaaagcaatccttggtggggattgtgcacagcttccaccgacggtgatatcgagagacattcggtggatgcctcagaaggcaacaattatcccggcattcagaagaccggatccaaaccctgccctcgaactatcgggcaaacacggtgctcgatcacagggctccggaaatgtcgctacaacatacgaggaacgtggccttgcgttcaagaggttgcgtctcttgatgaccagcaactgcatcgggccgtgggtactctggctacgaagcgtggctggcaatctctacgcgaccatccacctatccattggtagtcgtgtaatgctgctggataatctctggatgcagcgcgagcttttcaatgggtagtttgggaccggagaggatatagtttggcctcccggtaccatagatcctcgtcgtgagcggccatccaccatactcgtcaggtttgacgagtacactggtcgcgggattcggccagaaatatcctcagcagtctcgattgtccgttccacccgcgaatttttccttgggacaatacagtgcactcgtacacagtttccagtaatgctagcttatgcgatcactgtgcacaagtctcagggtaagggtggaccgggccgttcttaacatttccgagagaccccaatcctctggactgcactatgtggccgtctcgcgtatccgcactctccggggtatcctgttcgaggagagcttcaactttgaccgcatccagcctacacagcctacggcgacaatgcttctacgtttcgggaaccgtacccggcgcctacctcagcatattacgcgcgaggctgttcccgaatcccccgtagccagtcttctacttcgaccgtctccgcggcagtccactccgtcccgaattccaatccgctctactaatgcttcgtactcgagttccttgccttcttggagaagtacggaaactgttctggttcgtcgctcagctgctgctatagccttgtcattcatttactgaccgtattctattacttgtacagtcacaggctccatttaccgacgattcagaatatatgggttaaggatctgacagcgagaaaatgaagcttgaacgtcacttggacgattcgtaaagtacgcgtcttatcgaaggcgctgaccaaacacgcgatgcggaattgaagctttgtgaagacgatatcaaaatgagaagatcacaggcatggaagataatgtcaagaagctgccgcctcaacatgcctatccttttccacgcctcactgtcggggatgcaccaagagataaagggggaaatggctggttaatcttgaaccaaatgacccagagtcaacacgcgagaaggttgagcttctgacatgtgggcttatatataattttagtgagttcattcttttctcatttacgtgatttgtctctattgctgagtgttgctgatacattatttagaaaagtggaacatggtccgtgaatagggatttctatcaccactttaagtccacttgaagcggtcaccagattcaacagcggatatgggagatgggaacacacatgacgagctggtgcttatatgaagattatcaagatggctggtcgacgaagaactttactgtcgcaagctctctcgcaagctctctctaggagggagatgcgagaaaggtaattataagaaggtcactgggattggggcactgaaaaaaattcgcccaacagcagacttcggttctctccaattccttgaatttcgagatacccagcaaaaagcagaaatctttgaaatcagccattgatgactgtgacgtggacgattgctgggaaagctcataccatgcgcttggttcgcaagcagaaatgggagaagggagatccactagtaagaagcagcgaacatacttcgccatctcatcattcggagccggcatgatccggatactcagagggtgattgtggaatccaagctacaggtagacagtgatgttagtgtgtccatgaagcccgccagcaaacgcctctaacaattcaaaaaacagctccacccccacaagtgaccttctcttgccctcgaagctagaaccgacataccaatccgatggagaaacagtctgacgaaaaaggggacgaactccgcgcgttggatgggaccgcaaatggctcgacaccgtccagattggaaggattaaccctaaatggatcgacacaaagagtaccgcaacagaagaaactaccaaggctctagaaaaggaaattgattcctctccatccccactgtatctgaggtaccttggacccggcagctcctcacaagcaagcggctgtcgcagctgggatatatatcatattctcttctttacggggaaacacaggccttacattagtgattttactgtgccaatagtatttacctattctcagcctttgcggaagtttcatggtatcatcgactcgcgcctattccgcatggcatccgggtttaggacatgttactccttggacaaaacctggaagtcatgcaacgcattttcactgtggcatacagatggttagctcgctccagcggatggaacttcaggagcatggaagagttttccaactttgcgctggcgttgatgattgcggtggataattgattggcgagggttcttagagagagactagaattgaatagtgaagcccgtttattctttgaaaattgataccctctacggtgtaagagtgattagattctacaagtgttatgcgaactcttttggtgacggtgattttcacgcgacgtaatagactgtttttcggtagttactggcaagcaagctccacgtctccgaagtggattactctcttgcgcaatggttgcctatgctgtgtattgtctggtttgaactaacacaatttcgcagcgctatggatgatctcgacgtatagacaaatgatatctgacttggtggatcgaaaacgtcaacactcgatcgatctcgggactgaccgctctggcagagggtgcctatgacacgtgacaagtaattcacagtcacatgtcagctcattcttccccttttttgctatgttgtactacgaattacagatcaggaagaacatacaagatatattgcatgtggtctaataactaaggctctcgacatagtgaaaaaggaatataaacaatgccaacataaatctctcatggacaagacaatcataaactctcagaaatccacagaacaagcattccacagtatgaagacaacgaagagcaatcgatcgatatcgcgaacattgagcagcaatctcgttgaattaagatcgattaattgccaatcttctccgcaaaccacaccaccagatgactgacagtcgggtgactccacgtcaaagtcggaggcaccgcaaccttgagcgtctgctgcagctggcgacgcaaagtgaccgtcatgaccgagtctacacctagatcagcgagggctgccttggaatccacatcctcagctgtcatctgcaacaccttggccacacagccccggatcttctcatccaggtacgtcttgagttccggtccggatgaaggaatcgcatcactgccattagaacccgcaacaaccggcgtgttgccagacaacgcgcccacgcgacgcaccgcaatatcattgaggatggacaccggcaccggctccccgtcctcaaaggcacgacttcgcaagacgactccgtggtccatatcatacttggcgaggtgctgccaggcagaaaaagcctcatcgcgcgtgatatctgtgattcccttggattccaattccgcattaatgaagtctgtgctggcgcccatacctaggcctcgccacgacgtccactggaaggacacggccgagtcgctcaggcgcgcccggtgcgtagccagtgtatctaagaaagcgttgccgctgccgtaagaggcttggccagtaaatccgactaggtttccgcaagaggaaaacatgatgaagaaatcaacactcttcggggggaagacttcatgcaaggctagtgcacccgcaattttgggcgcgagaacccggttgaaggcgtcgcgtgtggtttgcattaccagctcgttatccaggacaccggcggcatggacgacaccctggactgcagggagggcgaggcggtctagggccgttgacagctgctccactgcatccgacttggtgatgtctagggggaggacatggacggaggcaccgcgactctccaggaggcggatcttggcaatggcaggctggagatccgtgctgacctggtcccaactgcggcgaggcggaagagcacgtcgcgagatgagcagtagacgtctggctcctttctcgaccaggaagtcggccacctcgagcccgagtataccgagaccaccagtgatgagatacgtgccctcggcgcgaggaagcaggcgaggaccgtcactgacagggcgcagcttgctgcgcggtaggctgcggaaccgcgaggtgcgggcgattccatcgctaattcggatgatgccggcgccgtggatgtatctcatcgtggagagggggattatgggctcttcaatgtcgatgagggatcccaaatcgggatgctcactagcgatgatccgcgccagtccaaacaacggggattgggccagggcagtggcagtttgaccatcgcccacgttcgcagtgagtgtgaagactttaatgggcagtgagccattgacaatgaatttgataagttctagcaggttccaagtgaacgactcggatgcagcgggaatctctgccagcgaggcgacctcgccggggatgtaggccacgacggttcccttctcgagtgggagggatagagcgttgctgaagaagtcctctgtgccggagaactggaaagattgaatttgagtcggcagagtcgcggcatacttggccaaggtggcagcatcgggcgagatcataatcaccgtcatgatgggcaaaggctcttcggccggggtggccggtggccaggcgatttgatgcacgagactctccatgctgccacttacgccgggtgtgccttcaatctcagagaaacgcatggccgtgaactttgcgaggacctcacccgtcttgctcagcacgctaacgtgagaggtgggcactgcgtcggaggcctccttgacgaagagccagctgatcttaggcggatcctccgaggtgaatatctccacacgctcgatatgggccggcatccgcagtgcagctgtttggaagacggtagagccgatggaggtggcagcgtcgagaatcggggcccaggaggaagaatcccagggcaggggcgcatccccgaggactgcaggattgacatcaacgcgcgccagcatctccttggtattgcggtagtgctctgttaccgcccaggggaatcccatggctgagacacctactttgtccaagtagtcaattgaaaagttgtctggaagcttggtgaccagtcgcgcgttgacggcggcgaggtcgatgcgatctactggacccagaaccttccggttccaatatgcagtggtgtgagtgacccaggaggcatcgtcatccaacagcgaaggctcgctcggaatcaggcgggaaacgaccttgacctgatcctgttgcaccacgacctggacggaccgtggcgcgttgatggcgacaggaacgcggagcaccacgttctggagtacctgggcaccggtgcccttcaagaaggtattaataagaccagctgccggaacgatctcggtgccgtgcagaggatggctgccggggaacggcttcgtttcgttgtccagccgggtagtatagacgaatgtgtcggttccaggcactgcaatacgctgtcctagaagcgtgtgcttctcgacatcatgcgtgaggccagtattgaggggcgccgtctctaccttgcgccagatgggcttatgcatccaggtcgtcgtaggcagtccggtggcccagcgtccaggcatctgcgccgcccagttcacttctgcgccgcgacaatgaagctgtgcgatactgtgcaggatatgcttctcagtcggcttttggcgaaggagagtcggaatgaccgcaaaattctccatgcctgcgtccataagcgtctcattgatggagtgagacaccactggatgggctgagacttccaggaagaggcgatatccgtcctcaacggccgcctgaatggccgtggtgagacgcacgcggttgaccatgttgccggtccagtattccacgtcgcgcaggtcctggccgcgagcatcgaccagtgcggtagaatacagcttgatggtgggagccgtgggggccagagtctgtccgagcgcatctcgcaggggatccatgaggccattcagagttggactatggaaggcaatgtcgctcttaacggtgaaagttttcacgcctcgtgccttgaaggcttctactgcctcggccactatctccttgtctccagccaccacgcaggaagaaggcgatgaatcgatggccacaaccaggtcctgtcgggagcccaatatctgttcagcctcgccactaggaaggttgacaagaatcatgccgcccttgcccatgacctgtcggtataataacgctctgcgagtcacgataagcgcaccctctgctggggataaagccccggccacaacactggccgcaatttcgcccactgagtggccgatcacggcctgtggagtgatgccattgctctgcagcacggcactaagtccgatttgcatgagataggtcaggatttgaacccgatcagacgactcaaaatcgcctgtccggagcagctcgatgggtgataggccaatctcagcttggatcagctcatcgagtggctggatggctgcggagaacacaggattgtgaatcagttgcttgcccatgtctggccactgcgcaccgtgcccggaaaatacccagactacgtccttgctgatttctgtgcccaacacacggctctgagtcgtgaaaggatggctgactccattgaccaatgcttgtaggacttgggtagcatcaagatggtcgtcaactacaagcgctgctcggtagtcatggtgatctcgtcgcgtagccaaagtcgtgagaacttcactcagattatggtcttttccttcagcggccatccactcgcgcaacgttttggcctgcagggctagccgtttttcttggggccccgacaataacaagaggcctggtccagtcactgctccatcatccaggggatctggctgtaggacatgactgaactcctcgatgactgcgtgagaaacggttcctccgtagccatacgagcaaacacctgctcgacgaatggggtctgaggagggccacggagtggcctcctgaacgaccttcacgccggccttgtcccagtcaattcggctattgagctttgtcaagttggcctggggcggcaggatgcccttttggatagtcaggattgcttttataaagcccataactcctgcaccagcctccaggtgaccaatattcggcttgacggacccaatgtagcacgggtcgtcggcgtggcggtcagttccgtagacgcctgcaatggctgatatttcagttgggtcgcccaagggcgtagacgtggcatgagcttccacatatcgcacggtgctaggatcgacacccgcaacggtaagagcagtccgcgctgctaactgttgcgctttggcattgggggccatgatgccgttcgtcttcccatcctgggctactgcactgcccttgataacggccaagacattatcatggtcaagcaatgcacggtgtagacttttgagtacgagggcgccggcgccttcacctctagcgtacccatgggcgtcatcatcgaaggacttgcaagatccatcagacgagatggccccggctttgtcgaggacgcgggtcagtcccggtccacagagggcattgacgcctccaacaatagccacctttgattcccccaaccggatggcctgaacaccatgatggatggcgacgagggacgaggcacaggccgcatccacggcactgctgggtcccatcaggttgaggtgataagaaatgcgattgggcacgccacaatacgcggtgcctatgcccatccaggcctcgacattcggcagatcctccagcactagcttggagtagtcgtccgagttcacaccccagaagaccgccgtgtcgctcccagacaggctcttggcaggaatgccggcatcctcaagtgcttccgaggccacctctagcgagactcgctgttggggatccatctgctcggcctccttaggggagatgccgaagaactgacagtcaaagtcctcgaggcgatccaagaaataaccacgcgatgtcgtcttcttgagctcttttgcatttcgtggatcccggcgatagtaaggctcccagcgcatcggtgggatctcactcactgcacttttctgactgaggagcgattgccagagaagctcggggctgtggttgcctcccgctacacggcagcccattcccaccacggccacgtcggtggagaattcctattcactgtcagtccgaggtacgcttgggcagaaatgacaacgttgggaggggccacatacatattcactgtattcagtcttaggggtttcagctggtgctggggatgttttcccagagggatatgtagaaggtgaaacagaattcatgtttgtcagtagcagtttggagactcagtctccttagcaaagtcaagcttattcatgaaaatgtctacagctatcggttattgatgtccctttatatcttttgctcaccagtacaacatcaggaaatcctcccatcacccccctccacggcggtttattatcgtctcggaaaagccgatatgcagcatcaacagagatagcggattgtggtctagtttccgaatggggacatctttatcttcaaccattcgtccattcggggatattgtcgtgtttccgccatattgcggccaggtttcgcaagaataaagttcagcgacagataacggggatctatggataggagccaagaattcttttcccgtccgtccgtaagtaatggtaatggcgatcttgagacatcgaggattggcggctgcagactgtcgtacaccaagggccaagcctctgtcagccctaggcctgaaagggatgcatgctgatttttggcccaaaggagtgccgggaacgatttcttcaaaggtactagatgagctatctcaccatttaggaacctcatgagtcctccgtacagatactccggaggaggagaaggtgcatcgttcaaaaactcccaagtgtggatcaggccatttcaacatgcttcaacaggcagcccatggggaactgattgaatgcgatagctagtatatatgcgacggtagagacacacgacgttttctggatattctttaggagaagagattgaatactcgtggttcttctgtaaaatccgattttcaccagttggtcaacattcgcaagcataatggctccatttgttccctaccactactcggccggccagtcgactattgttaagtgtgtaactagctccctttaccggtcttttgatcgctgacatagccagatttggtggtcttctcaccaccgagttcctcgaacctccaccaggtcgttgttttctcttccgtcagacataccgccacaccattgaaggctcgatcccagaaaatctgcgcaagctcatcaatagcgccgatcgaccaaagggtccgcctccgcatttccaccaattccaaaccgagtacttccgtgtcggacagggagtgctcgggattgcagtggacggggtcgtccgccgcatcactccagaagatggcgaaatctcggtcaaggcgggcagtgtgcataactttttcatccatccggattctcccgagagcatgacggtctacctgagtgcgtcagactccgggaacgactaccagctcgatcgggtcttcttcgaaaactggtacggctattggcacgatgcgttgttgcacgacggagggatcgactggatccagttcctcgcggtaatgatctatcccccgcacaaaatcttccttatcatcggctgacatagtagtagattcaagacggcggggatgcctacacacccgctcctgcatgggtgccctttcgccggcaggttggatactggacctgtgtaatcatcggccgctggattggcggactcctagggtataagccattcttccgagaatataccacggattgggactttgctgtcgccaagatgaagggttcgttctttcagcggcatctggtgcatgctgcattcgaggaggagaaatcctggacgaagcaggtagagctggaacccaaggctaagcctgaaaacgctgagtttgagcagtggacggaggatatgtctcccacctcattgaccctgggcgcagttgcgtatgagcaggtgcttttcaacggcgtacagcccgggtcagcgaatgagtctaatggtaactccacaggggtcgagagcaatttggagcagtcaggttcttggacgcagcgacggacagtggtggacaatgcgggaaagtagagatatatcacccgaaacctgctagtccatgagtcccagttcgtttgaattcaattgttatttttactccttgcttcctgtttcctgcttcctgcgtcggtcgagtacgatatgagatgatgattgattgtctagactgagatatgttcagatgatctggacggcggggaaaattcatgatctcacgtggctggcgtgtcacttgctatagaacactacgtctcttatacaccctattcaaaataatcctgcttcccataaattcctctttctacgtggactattaaacatagatcggttggttgtcgtacaccagggctagcaggatttcaaaacctcctctcagaggttgtagcacacgtttgacggccaactgtccattgaggcaagtttcccatagtatttcgaggagaattacaaaaacatctttgataatagttaggcagacaggacaggatatacgtggagacaatgtatcttgctgtgagagctctatacgagcagactccgattctcctttaggaaccctaaactgtcgcccacctagctgagtcccaatctcaaaataggtttatccacgtttatgaggacataagtatagagaatctgccctgaggactactttccggcatcaacactatggatctcctacagctcgcaccaacgcaccttctggcgatactgctcagtagtacgggcgcattcgtccttgtcacatacctcctccgtgcaggacatcgacccccagagctcccgaacggtatggtattgcaaaggataaggtaggaattcaaatctaacagatgcacagggcctccaactgttcctctttttggaaacgaactgcaagtgccaaagtcggatgcacattttcagtaaaggacaactctctgtgatgtagggggttaacatgctaagtacttcacataggttttctcagtgggctaaggaatatggcggtttcttcacgctgaagcgatacaacaacaccaccatcgtcatcagcgatcagaaactgatcaagacactactggacaagaagagcaacatatattcccatcgaccagcatcattggtatctcacctgatcacgcagagcgaccatctcctggtcatgcagtacggggagagatggcgcatgttacgtaaaaccatccatcaatacttcatggagccccgttgcgagcgcgagcactggaaagtccaagaggcggaggccaaacagatgctgcatgactatctgatcatgccagaggatcacatgctgcatccaaagcgttacagtaacagtatcaccaactcacttgtctttgggattcgcaccaaaactgtccacgatgagtacatgaagaagcttttctatctaatggacaaatggtctttagtgcaggagctgggcgccaccccacctgtcgactcttttgctctgctgcgctatgtgccgcagtggctgttaggcaactggcggaaccgagcggtcgaagtgggtgatctaatgcagtctctttaccagactgttctagaccaagtgaaagagcgccgccaacggggtgttcagcgcgactcctttatggatcgggttcttgatacactgaaacaaactccgctctccgagaatgaactacggttcctaggaggagttctgatggaaggaggctccgatacttcttcctcgcttatattgaccattatccaggccatgactaagtatccagaagtgcaggcaaggtatgctgaccgcgccaagttttttatccaatgggaaagctcatagggtggtattgcagggcccatgcagaaatcgactctattatcggctatgaacgctccccggcttggtctgaccggtccaagttgccctacatcaacatgattatcaaagaatcccaccgctggcgtcctgttagccccttgggggttacccatgccgttgcggaaggtttgttgaaaccggtatcttctctctcaaaataacaagagattggctaacaaatctcctcagacgaccacgtcgatgggaaactcatcccgcaaggatcgagcatcgttctcaacgtctggggcatgcatcatgacagtgagcgatggcaggaacctgagcatttccagcctgaacgcttcgccgatttcccagccttagcctcggcctacgcagcgtccgaacggcgagaccacttcggttacggggcgggccgacgcatctgcccgggcatccacttggcggaacgaaacttgataatcggcgttgccaagctgctctgggcctttgagttcctcgagccacccggcagcgacagtgacatttcggctcactccggcgctagtaagggattccttcattgccccaaggactatggatgtgccatccgtctccgttctccggagaagcgagggaccattatgcgggagtttgccgaggcacaagaggtatttgctcgatttgattagattagagcatacgctctaatatgacgattaccccctcctctactccatcgggcattgttatgcgagctgtcagcgcggcatcaaaaccttattttcctgcagatcatccgtgtaatcaatgcagtatgttccgatgtggatacattcgagtcaatcaaagcccacaattggtatcgcctactttttcctgacattatcttacttctttgcttctaacggcataggattttaagtttatagcaccggggaagcggcgaggcaagtaaactaaatctattcgtgcattttagtattaccacatggctactacatcgtacctagaataggcaatttgactcctgtacatcgatgcacgtcgcattgtagaggcataatagcatcactgtataacggcaactccgtttctgcagctcatgcatgtcgctgcaaggagcaccagaaggaccttctccgattccccacagattggaactaatttttgagataaggtgagtgctctagcacgccttaggcttggttggggttcacggagtgtctggataggacttgggttggattatcgtgaagaattcctctagcgctcgttggtagtgctataggactcgctatcgggactcacgctaggggttactttaatttactttgatttatttaccaatttattgtattgctacctagctaactacgcctcttccgcttgaaaatatttcttcactatcactatccatgtctataaaatctgtgattatatgccgcttatagtttagtactagtctattttataccatatacatggcgatcccacgtgtatctatctttccaatataggacgaagcttttccattagtacttagtaaatctgaccaaaactgaatgcccgtaagatctctcacctataaaatgatagaatgaattccctacaaggccattccaaccttggaaggctacctaatgtctattgtcttatctatccgacttcggccaatagaacaatcacgctcgcctattcttccaacaaagggatgtggcaattcagccaatgtccacgacaatagctgacgacatgacacactagtgggatttgtgggtgtttcgccagcatattgctcttttctagtctttattctgctcttcgttttttttcatgtctcatcctgtgcagggaagcccataatctacaacccctgtatttgcgcgaggcttcgatatgcaaacctcaggcatccaatcccaacacaactcatttgtgtcttcgatctacctttcggcccctccaccccctcccatctagtcttgagtagtctggagggaaattgcttttaaggttccgaccgccatttggagtcgaatgaatctggtctgaatgaatatctgaattttgctgtcctccactccaccgctccgtcatgtactccactttctccgccaacttcgacaccacgatcgacgcctcccgtgagaaatcagccacgcctatcacagctccacgaccaaagcgcaatcaggttgctcgggcctgtgactggtgtcggctcaatcgtgtcagatgcgatgacaagcagccatgtcacaactgcctgaatcgaggaggttcttgcagcaacacaaagccacaggaggccacctcgctcccagctgcaaatcggtaggaatcagatatctatctccctcatgatcacatggggatgggagtaaatggtttgctgattcacatcgacagagagttgcaacggctacgaactgaggtcaaggaccttcaagatcaaatcgcgaaactcaaagatggagcggaaatccaagcacagacgggtttcgcgacgcccccactatcggatgctgcccacacttcgttcgactttgcggagctcagcaataccacagaaggatggcaaggtctgcagcagacgggacagattcactacgggcccttgtcatcctcatattttgtctctcgaatcactcgctatctctcacaagccctaaaccagccattggaagatgcgaagttagaggcatgcatggcccgttttaattatgttaccccgacccatcaaccctctcgatgggatgcaagccccaacagtcaggcggatcagcctccagatggaaacgaggaggccgagggtctgacccggtcacaagaggaacactttatcaatctactctggcagtcttttcattgtgtctatcctatcctcgatgaacgcgagtttcagcaacattatgactcactatggtctaattccacagatggaatgtctacccggaagccatccgccttggtcgatgtgctattagcggtctgtatgcagtacagcagcaccttctttatcaatggagacaaccagcagtcagattcggagtctgaatggcagaccaaaaacgcgaatctagccagtcggacttactaccaaagggcccagaggcttctgcagagtgagctcgaaaatccaaccatcatggtcgtgcagagtcacatttattcgattgtctacttgtacaacacctccctgctgaatacggcacacattaacctgggtgccacgctacgaatcgcccatgcgctgcggctgcatatccgcccgctggacgggacctcccccgagcagcaggagctacagcgccggatttggtggacactctatcggatcgacagccagctctcgatggccctgggtcggcccccactcattcagttgtcccatgtcagctgcgggctaccaggggatgatcgggagcatgcccggctgtctggcacagtcctcctcacgaataatgaggatatcagctggctcagcttccatgtccagtgcacaaagctcatatatcttgttcagggtgtgcagacagcgttacaccggaaatgttcccagttgctgagcgggaataaggttaaggatctatatgacgacccgcgcctcctcgagagcttggcagagtttctcggaggggagatgacagccattcataactgggttcaaaacgtgccgcagtccctatgtaatgctcgcaagggggcgggggacccattctccaccaatcgggacgcgttgaatctgtctccgtatagcccactttggctgcaatgccaacgtctcctgctggagctccactatcaccatcttgtgatctcgacactgcgtcccttcatgcgattccctcccgtgagctcctccgtgaccccacggaccgacgtttacaatatctcctgtctgaatcacgctatggcaattaccagtatcctcaaccaagtgctatccgagacagatctcctgcgcgggtggtcgcccatcttccagtaccagtgggatgctatcctgtgtaccctgggatttgtgctcgccaatcccgtctgtcccccaaccccttctgcccgcaagtcattgcagacggcgattcgcacgctggacctcgtgagtgatcactttttggcagccaaaaacgcggcgcaggtcgtccgccaagtcagttgccaggcggatcgactcatcaataatgtccaacaaggtctaactcggcgacaagtaccgcgtacgagccagcccttgtccaccagggcgcagaatcccaggccgccgtcgaatcagaactcgttcgtcgcatccgggcaaccgggggtccggtccaactccctaaagcgggcgctgccaccgaccaccctggaaatgtcgtcctaccagccaatgcccaactttgaagcgcgcatgcacctaacggagatgatgccgattggttcattacccgagctatctccttctttggggacgacggagtctctctcgatgccctcggccacctctgctgacatggtcaccggtactgaagcccagtggctgcatgcgagtgcgatgatcatggattcctggactaccaatacatgattaaccgtgtgcttttttcactattccttttttgccttactgcatttacattttgtccgacttagagtaccataatccatagttgctaaccaagcagcgggttctgctagaggggagaagtagaaaagatacaaacaaactggataaataacttatttatagtacatatgtactgaattatgtgttggagcaaggattaggatataactaatcatattatcatcttacgttgtgaaaattataggaaaattttcgtagactcttctagataccagtagcaagttttagacacaagattaggaatattcacacttccttatccttgtctttcttttcttaacagagacataggggaggacaattcgtatattaaggggattggtatagaacccccggccggaggtacaccttcctaatcgggtaacgctagagatcacatgatccatcacagtctcgttactattcctagacgtcttttttatcaattatacgaagaaatcagggtgacgaagatatatcaacagtgtagaactaggtacagtataaacctacgatatatctgatttctcaagagccaaaatgacagatcaggtgatatcttgtcgtgtcaatctagcctggtgacctggcacagacgaccaccagcctcgacttgccagttctcactgccaatagccgtcggcacatagaaagtttggaacgaatcatatttttttcttgatcgcgtacagcgaattatagttgtgaccgtaaaaggtctgcttccaatccggctgctggggatccgcctgtccgcatggtaagccagtggtctcaaatcgtgaatgtctgtcgtcttgcctcgctcatatagcatcccgaatctggactcaaggccgtgaggatcggcacccatttggttgtcatccggtctgccagggttttcatcttggtgagattcgcaccggtgggccagtctctggatgatgtgtgtgtcaggaagcatatcgaaacaaaaaagttccacggcatgtcagataaagagaacgtacgtagataagatgacggtaattgctgctgtgcgccacgcaggcagaactgaattccagacattgccagtcacagatgacgagacattcagaccaatacccacgaacgtgacaccatccacggtgattctctgtatggcattcgtgagttgcgagttattgtgctgaatgaggtcgagcggaagaagacggccgccatattgcgcgttttgcactagttgcatcaggtcgggctcgatcagttttgtataatgctggaaatacgatggtgactcggtgatgttcatggtataggaaatgtccagtttgtgcagttcttgcagaaagggcgccaacagtctcttggcctctactgcggtatacacagggagtgtcagcggggtgagcagaaacgttgagtgtgtgatttgtgcaatcgccatcccaccagatgcggtgtatgtgggtaggtggcgatggtagtgtcctacagcttcaaagaaactgtgcgacgaggggttcttgttctcaaattggataacgacgcctgtgacggggaagtcgggaaacgccttgacggtcatggagtacacgaccccatatgtccctccgccacctccgctaagtgcccagtacagatctgggttctgggtaggcgatgcggtcagaaatcggcccattccatcgacaacctcccattccaagacttggtcggcactaagaccgtactgagagctcagggccgagtggccccctccttgcgtgaaccccccggctgggcctacagtggaacattccccggccactatcaccagcccttttagataggcagccttgttgatgtccgtgccttgaacgcccgcagccatccgcatcgctggcccggtatagtgtgcgttggtatagttcaggaaatcaatgtccttgagataatgggtccagatggatagtgcgcctgcaccagtcgacttccctaaataactaggatgcatgattagcgagagcatggcattgttactggatgatgcatactcatggcctgtgttgcgaatgacgagacgaatgtttctttcctgggaaaatcgaatggtctgaatgaagtcgtctggggagctagcattgacagcatacaagaccatcgcacctagcgtgcacggcttcgatcggggggtaaaggcatcgcaggtttcattggccacggtggctgccatgatggaagaggaggataaatcgctatttgatgcggttgattcaacaggccggcgatggggctcgtcggatgcattggattacttactggagctctggcttggtccactgctgtctcagagagcgacactcattggcgatatagagggggtcatgacaaggctgtcctagtggttgcgtgttcactaaccatccgccaatgaatgtgttgaaccgcgaccagtcgtctgaggacggccaacatgtatcaccgggcatgcatcggcaattcgaagacaatccagtcgaaggttgtaggattgatatgatacaaaataggacaaggtattggcagctgtgaagacgcattgtgaagcgagctgttaagtaaatccaatttcgatatgcccgctagggaaaaacaattcttgggtttaagaacatataccattgatctcgctctaggttctcgaatctaaaactgggtgccaacatgaattccgccgtcgaccaacatattcgtgccagatacgaagctggccagcggactcgccaggaacactgccacggccgccacctctttcggcccacccaaccgcttcagaggaattttcagccgctgttcctccacccattccgggttgatctttgaatacaactcccagggaccacccttgcacagaatcggtcccggcgagatggcattcacccgaatgctcttcggtcctaaaaagtgggacaattcctggacatgctgcagctgcgctgccttgcagggcccataggctgcagggggtgaccggtagaattcacgccccatgaaggagctctgcacgatgatggatgcctggggagacttttccaagtagggagtggccaccttgaccagctcgacgaaacccatgacatcgatcgcaaaactgctctcccagtgctctgtctcaccttccatatgcatcggcgatgctacagccagtcagtttgcattctaactagggagtgccgggaaatcaatcaccattggcgataatcacgtcaattcgaccaagtcgctgggcggagctctcgacccactggacgagggcatttttgctagcaacatcgaatgccgttcccacggcgcgggcgctatttccctcggggagcgtaggatagaagtcatcatactcagtattggtgacggtccgggcgcagtaggatacattggcctcctcctccaggaatttatgcaccattgcctctcccataccccgcgtgcctcctagtccacgttagtcagagctaagttgatagatttctctcttacttacctgtgataagcacatgggcacctttgagaccagtaatgagcaccataatgacaataactttcgaaatatttgattggaatgtgaataggaacgtgtaggaagataaaacaaagagacctgaaaacggcgaaataggttggaaataatcattggctctcagactatacgttagcctcctcaagtaacaagttggccaaaattacccgatttggacagtccccaactccgagactcctttgggaagtcaacatatatttggactagacagcgaaaggaggaacatgagatgggctattgtttccaatcccttttgagcccatcagtctccgccttttctagtcggcaatatgattctctgttgaaggagttttgatagtcttacagcgctttccatcttcatcatggtagaaaatcatcattcgtctttagaggaggcaaatacacccgtccagtccgatggtgatgtgcagaaatccgagttggctgaaattgatggaccatcgtcgaaatcttcacggattgcagcaggggaatcgattgcagacagcgttcgcaacttccttgaaatacgccaaggtggcattcccggtgacactggagtggtctttcacaagatctcagccattggaagcggaaccggagtgagtacatctaatccaaccgaaagaatcaggattgacgcttgatagtcacaagatgcacccaccgtctcatcggcagccgagtcggcttttgggctgttgagtcctctacaaaatcgacaaaggaaacagtattctcgacccattctcagcggattctcaggcacgatcgaccccggagaaatgttgttggtactaggtaaacccgggagcgggtgtacaactttcctgaagaccctgtcgggcctgtgggatgaatataaggaaatccagggtgaactcactgtggatggtcacccactgctagatgtgatggcacagcgaccacaggatattctcttctgcggttagtcatcgtttgatgtttgtcgttttgaacacacactgaccgacatgtcttccttagccgagtctgatgaccattttcccacgttgactgtggcggagaccctacgctttgcgaccagagcacgatgcggccccgaagtctcggccactaaaattgacacgatggttgctcagctagccaagctagttggtcttgaaaccgtcttgaatacgaaagtgggagatgcgaagatacgaggagtcagcggcggagagcgacggcgagtgtctttggcggaggccctggccacttgtgcccagtaagtgatatcttctgctcattcaagtaccaaactagcgattcctcgactcacacatccttacagtctgatttgcctggataatccaacacaaggactggactcatccactgcggtcgaattcatggaaatgatgcgtgagtggacgacacaaagtcgatgtgtggccgcgatgagcgtctaccaagccagtgatgcaattgtctcctattttgacaaagtcctggtgatcaactctggccgtcagatcttctatggccgtgtacaggaagcgaaggcatattttgaagatctcgggtttgagtgtttatcgaccaccaccgtcgctgacttccttaatgtgatgtccgctgatccagacgtgcgacgagcccaagaaggcagggagaaccaggtcccacgaacggcggaggagtttgagcgtgctttcagtgcgagtcctatctaccaggaaatgcaagtgtcggtacaagtggccaaggagcgttcccaagcccatcccagtccccttgtcaaaacatcggcctttgctctccccatctggcatcagatttggtactgtgccagtcgccaatttcgcatcgtcaccagtgattatagcttgtgggcggtggagctcgccacaatcgtcgttcaaagtctggtgttgggcacgctgttccgaaatcagcagcgaacgaccaattcattgttcattttcgcgtcttctttattctactctgtcttagtcccggcactgcagtccatggctgaatttggcaatggattcgctcagcgaccgctcatcctgaagcagaagcgataccagatctctcgcccgattgcatacgctctcggcttggtcaccacggatgttgtgtggaaggtggcagcgatctgttacaatatccccctgtacttcctgaccggatttcagcggacgcccggaaatttcttcacctggtttctgattatctaccttgagcatctcgccctgtctatgttctttcgctcggtggccatattttctcccaacatgcatcgggctgtgctgccggtggggattttctttaatatgtatgtcctctatacggggctttacgttcctgcaccacagatgcaggtatggcttgggtggctgcgatatctaaatgtcagtgggtatcatattatggggtttggacaaatgctaacatgtgacagcccttgtattatgcattcgagtccgttatggtgaatgaattcggagatctgagctatcagtgcagtatctcggatctggtcccatcagggccaggatataccgatatagcccaccaggtctgtaccgtggtgggatctcaacccggggatcgtcttctgtccggggattcgtacatccacgcccagtatggattcaaaacctcccacctctggcggaatgtagggattaacgcggccctattcgttttctttgccctttgttcagggtaagttatcagacgctcaagcctagttcatgagaaaaatctacgactgacactgggatttaacaggatcgggatggagatgctcagaacacccgcaggtcaactagccacagttttctacaagagcagctcacgaggaattcaccgccgcgataaaatcgataatgaaacaggatcagtccacggaaacgacattttggacgcatcggctggccaaggcaacgacgcaaatcggtcacaagcaagtcagagtaacgccctttcatggaccagtctctgtcttgacatcaaaaccagagatggcgatcagcgtctgcttaacaatctgagtggctcgatcaagagtggacaactcaaggctctaatgggggtctcgggtgccgggaagacaaccctgctgaacgcactggctggtcgttccaccattgggactctcacaggaactctggcgctcaatagtcaattgcttcccacgttcttccgaagtcgaatgggctacgtgcaacagcaggacattcatcttcctactcagacagtgcgcgaagcattgcaaatgacggcgcgacttcgacgcccagagtccatccctctggtggaaaaaaatgcctacgttgaaaaggtgattgagtggttgaatatggagcacattgcggatgccctagttggtgtccccggggccggcctcaatctcgaacaacggaagaaagtcagtattggcgtggagatggcatccaaaccagaaatcctattcctggatgaaccgacctcgggtctcgatggccaatccgcgatgctgatcgctcgcttgcttcgtcgtctggcagactcgggacaggccatcctgtgcacgatccatcaaccggcagcagagctcatcgaccagtttgacaagttgtatctgctgagccgcggagggaacttggtctatgatggtcctcttggaactcgctgccacgaggcaatcgagtatttccagtctcggagtcgcccctacggctcagaagagaacccggcagaatatttcctggaggttattggggctgggtctcgaaacgacgcccatatggattgggctagtctctggcatgacagccagcagggcaaggagcgagagaaggcagaacaaagtctggtccctgccgcagaacactccccaccgctggagcaacagtccctgtattcggtgccgttccatgtccagctgtgggtggtggttcagcgaacatggctttattattggagagaaccagattatgtcacatcgaagctctggatgagcgtcggaaactccctcctcaactccctcacctacttacagtctcccaacacagagcgaggggcatataatcgggtcttctctgctttcatgtctctcatcgtgggcccccctctagggcttcaggtgcaaccacgcttcgtgaccctgcgggatattttcgtccaccgagagcgagagagcttgacctatcactggctagcatttgtcttatctgcattcatcgtggaactacccttcacatttctcagctcgctagtctattggttgttgtggtacttccccgttggctatttctacgccccctcgcgcgcagggtacagttttctcatgtatgaactctttggagtctttgctactagcctagcccagctgtgcgcatcgctgatgcccaacatcgaggcagcctttgccgccaacggattcttcttcatgttttgtaacacctttgcggggacgctttctccaaagccagtgacaccctcgggttggcgctggttttacaatatctctcccctcttctatttgggcgagggtgtcaccgtggacgtgctacaagatttacccatccgatgcgagcagtcggaggtttcaatcttctacgcggcgaatggcacgacctgtggtcagtatgccaaggatttcctggaaattgctacgggatatttggttaatcccaccagcacggcggagtgtcaatattgccggtatcgcgacggacaatcatacgtaagtcctagtcaggagagagcaaggaaatggatctggtcttgaaactaatcatcagtagtaccaacaatacggctatgagtttgctcatcggcatcggaacattggcgttttcatcgggtttatcgcgttcaatttcacgatggttctggtgatgacctatcttaccaaaacacgccgccagtgatggaggatagattttggtctgctatggccacagtctcgaggaggggcatttgagttggggcaggttttcttgtttggcagtagaaaagtagaatagaaaagagaaatctaatttggatgagctgtttctcttcgaatcctttgcgtagcccactgctcggagtgtcatgttcttaattgtattaaactccaccttcctgctaacgtatatgattgacgtccaccacagctccgacttctcgatgatctttcttgatatagtcctttctccgtgcacaactgaattgggaaactaaattatacctgcacgaggaggcgcggcattactaccgcgacgagctagcttccttggccaatctagttttggaagttcaaccccgacttccccatggagtaagtcacaacggcatctcatatcaaggagccttggctacccagaccctaaccattgtggatcggcagatggcggggactggcttatgtgtatttagacaactatttcttcaggcaagttaaggttgtgagaatcttattctaactgatcggaaacccaatttttcctcactttgtatcattgcctttatttgacaatccaatccagcacaagatgaagctgtcagccgaggcaacggttatatctagagaagagggagctcagttgagctacgaagcctcatcctctcatcccagaaacatcaaagagcaagatttacagcctatccggcagattggcagtccagtaaggtgccctatcttcacactcgggattaaaacatcctctaactctccatggcttgctactagactgcgctgtgtatgggcacattcgcaattgccttcacaactctatcgatgagtctaatggagtggcgaagtagagctattaccaatgcctatattggtaactgctttttcacagcgggcttgggcttggtgctagtggcccagtgggagttcgtgcgcgggaattcctttggccatacggtctttggagggtttggtgagcatatcgttccatcattctgccgtctttcgtgtatcacgaccgatatctgattaacgtcgctcccttttccaggcttgttcaacttggctttgggggcaatcaatgcaccggcttttagggtggcggatgcctttgaagacgttcccgccgcgttgaataatgcaatttgatatttcatgctaggtcagtcaccttcctgtgggcggccctttcttttccttttcttttttttttagctggggtttaggctaatatgaagatatagtgtgggggatattcgttctattctttactgttgctgcaatgcctatgtcagtcgatgcacatatatatacagatacccagtctaaaaggtagtcgcagctaaccagagataggaacctggtatacacgggcatgctctgaacatcccaaacctcatacaccctgttggctgcatcgtactcctcgttggccgacgatcatgcatctactggagtcactctgaagaagactgcgggttcattcagatttgtctcgggcttgtttgcctggtacacggtcggccatctgatgtgtcaagacgcactgctattctcttttcccttgggggatacgagccccttgtatatgcgattgcggagacagagaaaaagctaggtgttaaattattaaggcgaagtggtcagatgatctagaaggcctgctgagtgtacgggaaatgagtgaactttaggggtgtcggtattgattcctctttacgaaagtgattatgagattcaatagaagctacctcgttgtggaatacattatcaggatataactcaactgcgtaagccaaatcaaactatttgcatgccggagattctgctatacggaagaagcaatcagggctatcgttgaaacaaccctaactccatgtgattaatgagagttaactgagtgtgaccaatcaaaagctcattatttatggaccaatcaagatgcattcgtatcattgcggagcgaagcaataaatcatgaaaccaattagccagtaacaggggggctttgtgcagcactagaagctagaatcagtcacttcgctctgcaacgattatctcgaatcacctcgtagatgtatttgtcttgggccccgtcgtggaactctataatagcctttttagaaattaagcttaacgagactacctataaatgagcacttgatgtatttacgtatctatatgacgctttgaccatctagggaccacctcattgtataccgtgttcacatggtgaattctccaagcttttggaagatttttgcctcatgagggtcgaatttcttggtcgagtgggcgtacatactcctgaccttcttcaagggatttctcgtctccttgggtgcttggatgttgacatccacgccgtaagttctatcacagtcgtagtgacagattaaccatggaaaattatacaacaaaagtactatacaaccattccaaggaccttctagggctgggagcttggaaatattctgattagaaattccagagtggatccatggatgccggcccagatggacccacttattaccctttttaggcacgccatctccgtcaaatgattaggtgagctcgggaattcccgaagtcccactcggattccaaaaggagattcggagtttgtcagtcaaatggtaacctgtgattggtcagataccaaactgacaaagatgaatgtcccaaaggagtaatctattgtcaccaaaatgtcctcttccagcactgctcgcatttaaataactagctagggtcaggcaatatggatattgatacgtacgtcaacctcctccactggatatctatattcctaccttccattttcagcttagtacgactccattgggtagtggtacctggataactagctcgactttcaaacggctgactaagtggcactcgcttttcaccatgagtgtagacaatccgacgccgagtgatagcgtgctcgaaagtcaaaccccagatcgtgtggacgaatcaatcatcaaagctgcggatgccgagaaggacgcagccccacgccgagaaattgtaggcctccgctggctgctcgtctgcattgctgttttctcagccaatctgctctatggtttggacaataccatcgtggcagacatccagggtcccattgcgggtgactttgatgaatacacgcggctgggctggctcggggtgggcttcactttgggatcggtggttttcattctcccactgggaaaagcttacgccatcttcgacacgaaatggctctttctcggttgtttgactatgtttgcggccggtagtgccctctgcggtgctgcccccagtatgaatgccatcattgtcgggcgtgtgtgggcgggagccggaggagcgggcatgtatctggggtaagttgtaccacgacgggcagagtgcagagagagaagactaaccatgacaacctaggaatctgaatctgattactatcctgaccacccctacggagcagcctgtgtatgtgggtctggttggattgatctacggcaccggctgtattctgggtcccatcattggcggtgctttttccgatagttcagctacttggcgatgggtacgtgtggtctctttctagtttcctcagcgagtgtgctaaccgtaatgaatagtcattttatctcaatctggtcattttcggagtcatgtcgcccatctatgttttcctcttgccttccttgccacgtccagcgggcgaaggccgcagcttcatcaagaagcttgtggagctggactgggtgggaactctcctgtccgcgggcatgcacatctccattatcttgttcatcgtatttggtggtgtcgaatggtcctggacggatgggcggaatatcgcgctgtacgtggtctccgctgtctgcactattgccttcgtgctcagccagtactattgtgtggggaccgacaaacaaaaccgactgttcccctgcgagttcttgcggaaccctacaatgctcctcctttacgtcataatggcctgtggcggtgcctcgctcttcgtggcggtttactatatcccactttacttccagttcatccagggtgactccggcatcatgtccgcggtgcggctgttgccgttcgtctgcttctacgtggctacaattctgctttgtggttgggtcatgcccaagactggcttcttcatcctctggtacctggtcagcggcatctttattctcattggagccgtgttgatgtacactgtgaaattgggtaccagtccctccagcatctacgggtactctatcctgatggggttgggcatgaccaccacgcaggccgcctatgcggttggaccgaccattgtgagccccgatcgggtggccgagtgcctccagttcatgaacatcggccagggccagagtcaactgttgggattggctattgcaagtgccattttccagagtaagaccctcaccgggcttactaccctcttgggaaacaaaggatattcacatgcggacatccagggtgcggttgctggcgctcagagtaccctgatggagcggctgccccaggccttgaagacagaagctctggaagtgattgtgaattcgattagtgatgtctacgtgatggcgatttcggcgggggctctctacgtggttgcatcatgtctgttgcctcgccgtcggttctagaatctttcgcaaggagggagagcagcgagtgttgacgggatactggctttgtatctgtgattggggtgtcttagataatggagttttattttctcattcatttcctcgagcgcgaggtaagcctctaggagtgtcctccgctcttctagtttctagatcatcataatatagagcttgtgggttgaaaatctctcctggaaatagactagaatatagcagataagaagcttccgcgactcggatacagcagacaaagccttcttctagtcgataagtgttgcaagtcatctccatttgtcattgggacatagcaatttaccaatatagtagtctccggaactccgactccgcatcccacctagtactagtagagagataaaagacatatccggccttggccaagtaacttgcctccttcagctgtggtgaccctgtaattgaacttgcgcagtggtaattatatcatctatctcatcttctagaattggcgttgatatagtagtatagcatgaaggttttcgaacagccctctaaaaattgtccgcactgtagctatacgaaaatccttctgtattcattgtagaagatatatctattttagtacgtaaagtactggtggtgagcatgaaattaccctatctgcttcgagagtcaagaagccgatgattggccgtatgtaccttttatatgtaaatccctaagaaaaggtacaattacccaccaagcattacggcgtggtgaccttacccccctttagccggggcctatatatatctagtctttctcttcccatgccatcttctctgatgttgtagaaaataaagtcttatttcacacagctatctattattcagtcaaagtacacgccatggccaccactcttcccagcacctacaagcaagcaagcttcaaggaaaaagatgccagactgactctagaacaagtcccattgactctgcccaaacgtaacgagattctgatcaaagtgcaagcctgtggcgtgtgtcattcggaccactttgccgagacgaatctcatgggaggaggattgtgagctatcccactatggaatccatggaattccgactaatttccggttcttttatagtcctatcgttcccggccatgagatcattgggcgcgtagctgcaattggagcggacgagaccatctggaaggtaggggatcggattgggggcacatggcatggcgggcacgatggtatgtatctctattatctccccaaaaagcctggttcccctaataagactatactaatgcactgaataggtacctgtgcggcatgcaaaagaggttactttcagatgtgcgatcatcaggaaatcaacgggatttcacgaaatggcggctgtatatcccctttctcttttcatcatcactctttcgtcattccaacggaataatattaagctcacactccggtagatggcgaatattgcatcatccgtcgcgaagctgccgtccgaatttccgacgaggtcaacgctgcccaatacgcgctcctgctctgtgctggcgtaagtgtcttcaattcgatgcgccacatgagcatcccaccgggtgggctggtcgcaatccagggtctgggcgggctcggccatctagcgatccagtttgcgaacaaacttagctatcgcgttgtggcactctcgcgggattccaagaaagaggaactcgtgcggaagttgggcgcgcatgagtatattgacacgagtcgggaggatgctgtcgccgcattgcagagaatgggcggcgcttccctgattttgtctacggcgcctgtgccggagataattaacccgctgatcgaagggcttggtgtgatggggaggttgttgattatgtccagtaagcttctttaaggccgtttcaaggcgtttggttggatgctgataaatatagttgttcctggttttgaggtcagcactggcatgttggtgagtgagattttcctctgcttctctgaaaaccagacagaaagagaaaacagaagagatgcgatcaagatattaaccccagtttaggtcggaaagggtaaatccatctggagttggcctagcggccatgccatcgactgtgaggacgccatcgcatttgcggaggtacatgacatccactgtatggtagaagagttccccttagaacggtgcaacgaggcatttggtatgatatctccttcacttcttgggttcattttctctgacctgttgtccttcctacagaggctatgatggagggaaaggtgcggttccgcgccgttctcaccatggagtaatgagtctgaggacatattgaggggctaccaagtgcaccaagcagcgagaagagggagagagagtttaaattcctatccagggcagggcccggctcagtctgcactgggggtgtggtacccaagttgcggcctaaaggctcaatttccaacaggatattagggatgatttccattatacttgccagatagtatttacgaaaggcagagtatgaaagttgcgataaattgagtgtttgagtatttacttctccttcgcgctatgttccacgtaatattcttcatcttccctcgtagtcgccccttaacagttgcctaaaatgtcgcacgcgatcttctctgccagtgcatctacttagggttagagattttgtttgaagactatatactatatattataggacagaggcttacaaattgtggattggggatctggtggtaggaacggcaaggccgaggcatccactactcgcagggcgtcaacgccaatgactcgagctttggagtctaccactgcctgagtatcatttgccaaacccatagcgcatgtacaggaggcgtggaagatggtgtccaagctcctccggacatgatccagaatttgcttatccgtagtagcaccaaagtgttttattccaatccgcagggcggtatcgccaatgcctagttgagatccagcactatgaaggacacagtgtcggtggacgatcatcatccccaaggagtttggagtttcgggatatttcctttttcggaaggacccagataggagaatacgcgccgatgaatcaatttcaccctttggcaagacgcacatgcacgtgcatattctataagtatactgtgcagacatcctgttaattgtatatccgttatactcctcgctctcggtctctcccggagtcttccgcaatccctgcaggccttacgtagtaccgcgttcggaggtcctgcactggtatctaatcagagtagtgtggtcactgtatgcaagggaggaataaacagccagctagtcagtcgaatatagaatgattgctagagatctgtatttgagggggaaaagcccatcaataagcgttggtttgccaaacggatactctggtctctaagtgctactccaataccatccatcatggcgaaaattgatgtgcaccatcatttctatcctctggcaatgcgccaaggtcagtcccacgcatgttagagttagagtgagaagcctattggctaacctcatatagccctggatcgcgcaggaggtgatccctcgggctggtacactcccccctggacgctggagctagaccaagacatggcgcgacgaatgaaggttaccaccaccattctctccgtcactgcaccggggccatgcatcgagcctgattttgttaaaggagccgccctagcgcgcagctgcaatgaatctgcggccgccattagggactctcagccgcacaagtatggcttctttgcctcggtcccctctctgttcgatatggcggcggtcttgaaggaaatcgactacgcctacaccactctccgtaccgacggagtcactctgttcacccgctacggcgatggtcccaattacctgggtcatgtagcctttcggcccatctgggctgatcttagccgtcgcgatgccgtggtcttcatccacccaacccatccggtcgatacgcagctcgtcagtcaatggctaccgcagcccatgtttgactatccacacgaaacgggccgggccgctatggatctgctgactagtggcattttgcaagactatccgggttgcaaaatcatactctcccacgcgggcggaaccttgccgtatttgatctaccgggcggctaccatgctgccgttgatgccacgcactcttggtctttcaactgaagagctggtggcagctgctcggaccttctacttcgacacagccatctcatcaaacccggtcacgttgaaggcgctgttcgagtttgccgcacccggccatgtcctcttcggcagtgacttccctaatgccccgcatgatgcgatccaacgctttacggattttctcgaggcgtatgagctgccggaggagaccaagcaacaggtaaatagcggggcggcattagagttatttccacgattgaagaggatcccggataaagcgagactctgaaatggggtaggatcaatatggtagctgtacataagaagctattggtagggggttggagtcaaggctgatgagacaatgttgccgatgacctaatgattatttacatatcgcgatatgactttagtagtagaagtattggcaatacattatacaaattgcaatcgatggacctatcagtttccggtctgtttgtctctaaataataaactgggactttgttggcgttactcagagcaagcatagcttctctctccgaaaaacttggtaatgttctacctatcatccagattatccaactcggccattttccctcctcgatgaagcggtcgttcttttggggttctatatcaagcatagatgctccccatcagatgggtctggaagagccctctgtaggatatcatatattttcgttttatggtgagcagactgaactcactgtcgactctacaggaagagggaagtgtttccccaaggggaatcttagccggatgacacactcctttgggtaactgggtaactgggtttcttgaggattgcaagaaatctgcctatgcatcaacccctctccttgtcgatctataagtaagcgtacatatagttacccctcatctcgacgaagaaattcaacctgaaggattcagcccggatagatctcatcaactatcaactatggaaccactattgctgctactcctggtcttattaccagccatcgtagtcgtacgatatgccttcacctatggtcatcgtaccagcactatgcccatcggtgagttgtcgtcttcaatgttgactcagtgcggattttgctcatctggcataggtccacccaccctacccttcattggaaacatccaccagatcactaagaagtacactcatatcaagtatgtttgataacctccattttccctttggagcacacagaggagattctcaccgccgatgtcttgcggaattcaggttcaccgaatgggccgctcagtatggagggttatatatgctcaagatcgggaatggcaatatggccgttatcacaaatcgccgactggtcaaagaagtcgtcgatcgcaagagcggtatctacagccatcggcctcattcctttgtcgcgcacgatctcatcaccaaaggcaaccacctattggtcatgcactatggcgaccagtggcgcaccttccggcgactggttcaccaacacctgatggagtccatggtggaaagcaaccacacccagattgtcaacgccgaagccatacaactggtacgagactatatgatcgacccggagcaccatatggcccatcccaagcgatacagtaacagtatcaccaactcgatcggtaagtctcccatctactatttattgctggaagctcctaagtccctgtcacagtattcggaatccgcacggccaaccgggaaggatccaacatggggaggctttacaaactcatggaggaatggtcggaaatgatggaaacgggcgcaacaccaccagtagacctattcccctggttgaaactactaccacagtggttttttaacaactatattacccgggccaaggccatcggcgtgcagatggaaaccctctatgtcgacatcctgaacaaagtgataaaacggcgggaagatggcgacaataagggcactttcatggacaaggttctggatagccaagagaaacataatcttccctggcatcagctggcctttatcggcggtgtcttgatggaaggaggctcggacacaagctccagtctcacactggctatcgtgcaagcattggtccaaaaccccgatgtgcagcgaaaggcacatgctgagattgatgcggtggtcggccacaaccggtcacctgtttgggaagattttgaacaacttccttatatcaacatgatcgtcaaagaaggtcaccggtggaggccaatacttccactttgtttcccgcatgcactgggagagggtaggcctcttttctcttactttctgtccttttctgtcctttctaacttctatactaactatgggtatccttatagatgactgggtcgatggcaaattcctccctaaaggcacaatagtcgttatcaacacctggggtatccacatggatccatttcaacctgatgacccagctgctttcatccccgaacgctttgccaaacatcctcaattggctcccgactatgtgccggggacatgggagcgtcgcgaccactatggctacggggttggacgccggatctgtcctggcattcacctcgctgagcgcaacatgttcctggccattgctaaactgctatgggcgtttgacttccagccgggagagggcccgatggatagtgatccggttaatggataccataatggcttcctttactgtgccaaagactatccttgtcgacctgtagtacgcaacgaggtcattcgggctacgattgaaagagaatttgggattgcgactgtggatgtgttttctcggtttactgagggatagttgaaaattgagaggcgggatggccgcattcaaattatttttggagctgtgatgagcgacgagaatgagttgacgttcttttttctcgttttctgatcatttttgttttcaggtgctctctactatactaggtctataactttcaggcctagattctcacatcatcaacacagtgtttctaggctttcagcaacgtcaatccatttgtaaaaggtccactatatatccgcggcgagcatcccctaccaatatgggaaaggacttccaaaaaaaaaagatttctcggtgcccccttcatgggaactatgatgaattggcttgctacttagatacaaaaattattacactgatacctcatttgagatgccgtcaaactccagcccgtcctcttgatcagtacgttctatcgtcatcagatgctcccaatgctcgggatacttctgactcgcccatttctccacttcatctttccagtattggtacgggatggcgttgtagaataacccgatactaggacagatattagcgatgataacacagatagcaaaggaatttactcacgtattgctggtaggagggatcccgatctcagcttccatgttgtcgatagcttcaacagccaggtcaaattcgcattgagctgccaaggcctccatatacgccgaatagagcgggcgattcgcagtgatctccagtttcttgaccttgctcatcatctttatagcctcctgggtaccattgtgatgattctcacagaccttgaagaaaatcgtgatagtcttgtgacaagggccttcctccgactgaagaatctgtcggaagatttccatgctcttttctggcatctcgcatgcagcatacgccatcatcaaaccatttaggattctcgtgttgagatccacctcaagatcaagctttagcatgttgtgtacaagctttagattggttgcatctgccgtgcgagccaggccctggaaacagcgggcataagtgtctggcctagggcgtcgaccaggttcatcggcctgacgcatatgtccaaataccaagacggcaagatcactgcgcttccggttgaagaaggaggtcatgattttggtgcgagctgagacccacgtttccgggaatgcgatcttcagaagctcgtatgcattccacacgtcggtgtcggactggcttttatccgtaatgtactctgtgagggcgtcccgtaccggcatcttttgttcatcgctgtagctgcctagtcgtggacgtagcaactctgaaacggcgtcgaggtcgtggcgataaaggagcatgtgagtcaatgcggcaatggtcgcagactctaggcgcacgttctcttggaaaagcgggtctaggagggaggatatctggtcgaacaaggcatccttttcttcggatcggcagagcatcgcgatgagcttgtttgcgattggcaggttgtgactcgtgagggaagtcgtgtcaaccttctcttcgagaatcttcaatgtctcatcgacatcgccggcctgtatacaggactccaattctaagatatgagtttgactatctgggacaagaccccattgacctgcgagtcccatgaaatcagaagccaactgcgggttctgcgttgcgttcgcgtactgaataaggttattaacaatgtgaatgttgatggagccctcaagctgcggattcttcgtagtccatgaatggactctttgcgcaagagcagaagcattgttcccctttgctgcttcccagagcaagattatgccaacggtgtcttcgctgggctcattagggagggacttgaagatctcctctgctgaatctgcccgcgaattcaagagataatatttgatgagagcctctctcgcagccatggagggttccgagccatcagcaatcggagagtcgtagacagtttgggccgctttccattgaccgtggtcgacgagaaatgtaactagctctccatgcgaggcttgatcaaatttattgccatggtttccccactcatcaacaatcttccgcacctgtcgcagatcgtccttcatggcaaaccctttcataattgtgagccatggcgacgggacagccttgctcatttgaccccagaacttcaatagggtatgtctagcatcctcgggattaccattcatagccaatatattgatatagagaccaagggccggccggctgatcttccccggaccaaatccatgatcgaggtttagttcttgatatgcatatcgggcaaggttcatgacaacatcacgagcctgtgggacacactctgactcggagagtacatccaacaacttttccaaattctcaatcgagaaaacattctgccagtcttcttcttccatctcgccctgcagggcccttaaatgtttgaaggtgacgatcagcgcgcgggcttggaaatggctgatgagcattggcgtttcaagccgcatggtaaaaaacgtttggaatgccttcgcaagaatatcactcggaggagttctgcttcgatctttgagtgccctcatcaagtcagccattggtttcaggcccttttcggagggcaaaatagattgcgaccgctcagggtccgagctgaagacaaagatgttgcgtcgcgaggtataaggaaggctggacatggcaggtcgtactcgggcaggagtgattgtgtgcaataagcgatttcgatggcattgggagaaccgaagtggttcattgttaatgattgcccggaagacccgtcttgtgagatgggattgcattatggattatgtgagctgagcttatagcccagatagaacaagatgaattggataaaaacgtgtagtccgaagttgactcgcaatctgcatggaatcgtgaaaaatgggggttcgcgacgcggagagatttggaggcggaagaagtcttggcgaaaaagatctcatctccgcgttgcccggtctccctaacaccgtcttcaacatcgacaactaatcagggattgaaaggtcaagatgtctttgaacctcttttcttcaccgtcattgctgcgcaatgtcgcggccacagccaatgttggcctgtcgctctgtcgctggagctcgaccgctgctatgagcgctttcacttctcagcgcgccacaagctcacagagtatgtgatcaacccgatacaccgagcttattcatttttgtccattctataatttgggaacacatttatttttgggtttgcctagcgactaatgtattgcgatagcctcccaaatcgtccaacgacgccgtttacctagtcgtctgaagttcctcgaggaccagaaggcgcaaggcgagagccgagcccttgagagatatcaaacccgtgacttcaaggctggagatatctacgccccgcacgatctcagcccggccgagatgaagaaatggggaaagcgccagtcccctcagacagatgctttcgatgcattgaacgtgaatcctatagatttgtacaaggtatgcattcctcgagccaatggagctatatggaggatataccatcatgaacagccactaactgttcgctcttttgccattacagaacttctccgtcatgtccgaatatatgaccagcatgggccgtatcaagccccgagccattaccggtcttcgacctgtcaaccagcgcaaaattgccaaggcactccggagagccatcggcatgggccttatgcctagtgttcaccgacaccccgaaattctcgcagccgagatgcgagcacgcatggagggccctggaggtttctaagccgaacatactactttggagtcattttttgggatctgaaacaaatattgggagatttccttgtacaagtacaggccggtggctggtagaaagggcacgacttggtgtattattactcttagcgctatgcattgattttattgagagctactactttcaagttcttttgtgctagaatatttgaagctatcagatacattgcagatgtgttgacagtgatatttctcttttctgcatactcccaatgcttgttttaagtagacaaggcgtggcggtgttccccgctattgtggcccgtacgtcagtcgataaacagtggactgtggactctcctctgctttcccccaactcctctgcttgagtgtgtacatcttagcaatgtcacttacaaatggtgagaacctgtcaccctcatattatatattattgtcctgacatattccaagagtccatttgggccgctagcccctccaccacccgcggccagcccactcagctttcttctgatgctaaaggcgagcgattggcatatgcagtatgttattctaacaatatctacaatagtacactgcctcgtcctgacatcagcgattatagtccaacaaatccatcttcctacgttcgatcgatgaccccgcagtcgctaggcagtacaccgaacacaaggcgcagacaactgtcgcacgcttctccccctccggcttctacgttgcaagtggtgacgcagctggaatagtgagagtatgggattgtgtcggtgaaggaatcaccaagggtgaatatagcattgttaatggtcgaatcaacgatttggcctgggacggtgactcccaacgcattattgctgtcggcgatggtaagcagcgatatggacactgtatcacttgggatagtggaaataccgttggggagatccacggccatacgcaacagctcaacaccgtgtcaattaggcagcagcggcctctgcgtgccgccactgctggtgacgataagaagacggtattctaccatggaccgccgttcaaattcaacaacggaattgctgataagcactcaaactacatatacggagttgcctttagcccggatggttcgcacttagtcagtgttggcgcagaccggaagatctggctctacgacggcaagacgggcgagaccaagggtcagatcggtgaaggagaacacactggcagtatctttagtgtgtgctgggccaaggattctcgaaagttcgttactgccagcgcagaccggaccgtcaggatctgggatgtggaagctggcaaatcaacccagacctggaccttgggagaggagggtgctatggctgttcgtgaccaccaagttggcgtggtctggcccccaggaagaactgataacctgctcataagtttgtccctcagcggagacttgaactacctggtcgagggaactcctgagccccgacaggttatctcgggccaccagaagagcatcacctccctggcacagaccactgtggataacaaggaaactctgtggacaggcagctttgacggaagagtctgcaactgggatgtggcttcaggtaaggccgaggagattgaaggagatgcccaccccggttacgtcgccgggcttgcaaccacatcagagggaagcggtagaatttacagtgtcggctgggacgacaccctccgttctgttgacgctgctgctaaaacatatacgggcagcgcttcaaagctcaatggacagccaaagggtgttgcggctggtgacacgaccgtgcttgttggcgaagccgaaaccgtcgagattttccaagatggcaagaagaccggagaatacaaaacagactttaccgctacaaccgtggccgcgcatggttctcaggcagctgttggaggcgagaatggatctgttcagatctgtgctatttcgagctctcggctttctccccgggcagacattaatgcctctcgcaatccaatctctgctcttgccttctccccagacgcctcccacttagctgtgggcgacttgcggggacgtgttctagttttcaaggttgcagatggcagtctagttacagaccgttggacggcgcatactgcacggatcacctcacttgcttggaatgaggctggttcacacgttgtgagtggatcactggacacaaacatctttgtttggagcttggctaagccaggcgactggcttgagctgcagaatgctcacaaagagggtgtccacggtgtaggctggatttcaggaggctccaagatcatctcagctggtgctgatgcagcggtgaaggtgtggaaagtagatgggttgcaataattatgaagtactccgtagctgtcacagtattttcctacgaaattataaacgtcgagagcttctctttgttgacaaacacattcgaaattagcatcgagtctattaatatcagaaatgcattctcgtaactcaagtaactcaagtcccccgaattgtacacaaagcaaaaagcaaaacaaagaggtgcgtggcaatgggaagtggggagtgactgtaactgtcccagccagccaacaaattgacctgcatagctcctggcacctccccacaaccgtctgacgtcttcataaagcctggatagaagggcgacttgtcgaagatgtgccatggggcttgtacaacgccctaagtccccgcgaagtacgtgaaacccgaaagatgccatctggaactcccagcagctcccgacgttcgcgcccaacggtatgtgctcgcagtttttgacttggaagatactaatcgtcggtgaagctccgtcaggctacatttgtcctcccaaaaacaggccagcgcctgaaaggcctcatcaacctccgaaactccacgcctgacaacaatgaggaaaggcgcgggctcctcacaaacgagatccaacattatgagggctacctcgacgccctcacgcggcgtatacgtgataaatggacgcagacaaatcagtttgttaggtcggaaccgggtattggagtcttgaagtacagtcttgcgtatctggtcggatctctggcaacttttatccccgcggtctcggccatgctgggccatcaggatggaaaacacatggtggctacggtgacggtctactttcaccctgccagatcccagggtgcgatgttcaaggcctcgatctgcgctttcctggcgttctgctattctaccttcttgactattaccagcatgttcgtggagatgtttttccaggacacattggaattgcctgcccttggtcatgctgtggtcctgatagtattctgtggcggtgggcttggctttgtcggttggaccaagcaacgactgggagatcctctggtgaatgttgcctgttcactcacggctctgtcaacaatcacccttttaaccaaggagggttctgtacaaagcggtgatttgtctctttccaagatcttccaagtcctaaagatggtcgtgatgggcgtggtggctgtcatgcttgtatcctttttggtcttccccatatcagcgcgtaaaaagctgcgctcaaacctcgtcaccgtcaccgatacattggctatcatgatggcacttatcacagaaagcttcttgagcggatctgaggaagtgcttctctcggctgaattcgttgacgcagaggcgaagcaccgcaaggcctacagccagctcgacaggctcgtccgagaggctaaacttgagcactttgtggcaggcactgaaaaggagtacaggctcgaaaagaatctcgtccgttgggtgcaagatattacccataacatgggaggtttgcgtaatgcagcttctctccaattcagtttgattcgtgagactattgcccatgactctgtgtctccggaagatcagcaaggtagctcgactcatgtggactatttcatgaccctggagcggtcctggtcatttcccgaagggtcctttctggagcctattgttgagcgaccagaggaggaactatctccagtcagctcccatcaacttggaagtactgaatcaacacccagacccacgcttcttccagcagatgtcttcactgtattcatctctcatcttggccctgcaatggtaagttgggactcaagaagtatttgatataattcaagactaactagaagcagcgatcgttggctttcacattgaaagaaatctttaaggagattccatttgggcctgcaccggactataaggtctcagtgaatggtcgactgcgaattagtcttgaccgagcgcttgatctttacaaagaatctcgcgagaagacactcgcaaccttgtatcaacaaaaggaaaccatgaaattgaagtcccgtgaagctgaagccgatcttgaggaagtgtcagctagctgtggccatttcagcttttcgctcctcgaatttggggagcagctccgagagatgctttctatcttggatgagttgcagttggaagtcgaagagcggcccaatgggcgaacctggtcgtggcttaaagtttggcggtggtcgagaaacgcggaggccgctaaaatagcctcatttgacgatggtacgtatgcatacaaatcgttgagacatggattatatattaattctctgcagagacagcttccaatccaaccggtactgggcaggactcccataaacatgctaggcatgcgtcagacggcttgattgcacatgatacactctctgtcaatgtccaaacacgaaaaggcccttcggcgaatgaaacaacaaagcaaaggctcggttaccgtttatggaaatgtcttggattcttccgacgagatgatacgaaatacgcgatcaaggttggggcaggagctgcactctatgccctacctgcttttcttccttcaactcgcccgttctatgggcgttggcggggagaatggggtctgctgtcctatatgctggtttgctcgatgactatcggggcctcgaatacgacggggtatgcccggtttctcggtacttgtttaggggcagtcgccgctatcctagcatggaatatcaccgctggaaatgtatttgctcttgcattcttgggatggataatggctgtctggactggatacatcactattgttcgtgggaatggacccatgggccggtttatcatgctcacttacaacctctctgtgctctacggctattccctttctcggaaacaagcaaatctggacgaagatgaaggcggttctcatccaatcatggccgagattgcactccatcgagttgttgctgtgttgtctgggtgcatttggggaatcatcatcactcgaatgatttggcccatcagcgcaagaagtaggctcaaggagagcctaagtcttctctggctgcacctgagcctggtctggaaacgcgatcccctatccatcatggccaaaggcaaaaagtctgttttatacatgacgccccgagagaagcttgagattgaacgatttttgtctcggttggaatctctccaggctgcggcaggctccgagtttgaactgaagagtgcattccctgaagcctcatatgccaacattgttcgccgtacacgcagcatggtgaattctttccttaccatgaacatcgagctgatgaagaataatgtggccactgaaggtgaaatcagccttcttcaatacacaaaatcagaacggctgcagctatctgctcgggtgagccatctattatcaggtcagtcctcttgtaacttccttgtgcacttgatgcggcgctgattatcttccagtgattgcttcttcgatgaaactcgagtaccctatgagtgatgtccttcctagcattgagcatgctagagaccgattgcttgctcgcatctatcgctatcgcctggatcatgaagcatctcaacagactaccgatgaggactgtgctttgctttatgcatacagtgagtatctctttggtttctcgtcccttccaccagttcaatacactgacccttgtccttctagttttggtgacaggccaattatcgaatgaaatcacggagatcattgcagagatcggacaactgtttggggtattaagtgaagatgtagtgcagctatcttgaaaatctagctgatcaatttgaaaagccctcaaaataacaatgtagagaaatatatgtaaacatacaaggcaacactgctaagtttggcgcacatcgatgtatccgtttttggcgtctggcggggaaccgcaagtcggaacctccccttccactcaaacccatcgccatctctttcattccatcaattttcatcttcaattcatcaggttgtctcatgaaaacatactctcttcccctatttctagtttgaaccctagaatcctccttaatgaaggcgtaggtgccaatattccctgcccttcggcgtcgcccgtcgcgccctcgcgagttcagcaaccatgcagattgatccggcggctctgagtcggagtgactctgtctcaaatccaaagggcaccgtgcccaatggctcagtatctgcgaagacctccagagctctgatatcggtgccgcgactagagctcgagcatgcctacacggacctgaaggccgccatcggagacaagtgggccgaatataaggagtctacagctctgttcttactaggtatgtcgtgatgcgcatggggtttctagttaaatggcgattgcttgcgctccgcggagagtgtttctcccttccctcctatgtattggcctctgttcgatcacctcctaacttcttgcctgatgataggacactacaaccagcgcgaatactcctcacgcgtcgattacttcttgtgcgccgatcctaaaaacgagcatctacataacaatttcgtatgcgcgctcatcggaaacctcacgcgagacctccccgatcacggcgtcgcaaactgggtatcggccaacgacaaaccatccacggtgtcgaaacccgtctccggagatgctgcggaacaaagattgaagacggaggttatgaaactacctccgagggaccgtcggcgcataaagggaatcccagaggtgcgtagtcgcaaacgatgactaacaccttcacccaagaacccgacagctaacgatcaccagcgagatcccaatgagaaggtgcttacagagcttgaagaaagctatttagctaagcaattcaaattacccagccaggttcccgcaagtgcaggcggcttgaacaaaactagtacggcaacactctctccgttcctatggtcaattcaggaaataatccctaaccatctttctccattacagactgggagctggaaatccgaaaacgatatgcccagccgctagccgcagaaacaggcgaattccccgatgccgaatccatccatgcccgcatggtcccgatatgttacgaagaatctctccccagcggtgctgcgctcccatgtgctgagttcatggcaattgcgacggaaactttcgtaaaggaagtcttgtccgcagtattctcgcgcacccgttcaaatggcccatccggtacaatcaataacatgatgatgcgtcaataccgacaccaactagaagttgaagagcttgcatacacacgtggggagatttcgaaggattccgccacaggcctactccccgttgaagcgagagaggccaacctccgaaaacccttaggcgttagagacctgcggttaactctggagctgggcggcggtgtcctcggccacatgccgctgattgtagaccagatcatgaacagttacttcgaagacgaactcgagaccgaaagacacgatcgaatggagaatggcgctggtgaaccgcatcaagaaatcaaacccgaagacgagatggacctggacgaagacgaagctgaagacggttctctgctagactgggaaggcggcacgcttggtgatcgagctcagttgagctctttgctcgacgagtgtctgtccatggctgcatgagaattttatacccccaatgtctttttttccccgtttcatacatgctacattacatgctttttctgttcttctttttttttttttttggcttcactcacgatttggatggtggctcacggcgtctgggtactaccaagggaggctgtcactgtttgtggcgccacattatttgcatatggatttggagtttgaagatatattgtcttatccgttctcgaccgcccctgccttgtcctctatattcaccttcctattttggtcatgtacagtatcacttctcaaggacaaggtcaagcggtcgatatctggaggattgaaggaaacctcgaaaacaaagagacgtaaaaaaaagctgaatggccatgacctctgttgggaagaggaggtcttgttcgatacccatgaattctactttacaacttggttatcttgagaagttattacatatttttacattaggaccctgaacttcttgacgtgagtcttagcaaagacagacccctgtcaaagatgaattccatgggctttttgcccccgagacgcctgtagatagtacaccagaagactgtgctagctagttgatgatattcgcgacaagcttcagaagctcctcggtagtcttgtaggcattggccgggtccttcgcgatggactgccagatctcaccgtgcttgggttccattgacatgcacttcgacacgacgtctgctcgtttttcctgtaactagatgtcagctggatattccaatgataacgataacacagagcccaaagagtgaatgaatgaaaaggggagagagaaactaacctcggtaccatgctgcataaggaacttgtaataccaagcccagccatcaccgtaatcactatccaagacgatcgccttctcaaaccaggtcatggccttctccagccgacgctcgccccagaagatacgcgcaacagtgatgaacagaatcgggtcgctctcgaccttcttgatagcctccagactgcgtgccttgcgctgagcgcggggctcgagataccagatgctttcgctccacagaagccccgatgttgggacgtcctggatcgcgcgcgccatgaggactctggcctgggagatgttgttggcgcgacgttcaacgcgcacactttcggtccaaagctctgcgttcttgggaacggccaagcgggcccggtcgaggacggatcgggctcggaccacggcgcccgctttctcttccagtcgcgaggcaagtagccacagcgcaacggacttggggcaggcgcgggtgcctgttccgtatgcctcgcgcgcctgcgggagcttgttttgcgcttcatagatttggcccttgatcatccagagcttgtcggccttcgggaagagttgcagaccttggttgactagatcaagagcgtcgtcgatgttgccgagctgccgctcgaaagcaacgctcttggtccacacgcgatctgtgccagcttcacggcgggcggtggccaggagctctcgggcttggtctggctttttggcgtccgcttctagcttaacagcagcaagccagatatcttcattgttagggttttggttgaaggcacggcccaagactcgtcgagcatcgtcaatatctccagattgccatttctccttggcaaggaggagccagagctcctcgctttgagggcatgcttcgactgccttctcgaggacctgccagagagcttctttggtgccgtggttgcgctcgaggtccgctgctgcgagccagattgatcgacgattcacaaagactcgcagggcgtaagcgtaaattgcccgggcagtttcgtagttaccacgggcaatactggccttcgcgtcgtccatccagatatcttttcggtcatcatcctcatccaggccccatccgagagtctcttggatgatactaccacatgtaagaacggcgccttcgctttcgcatttctcggcttctgtgatccattcctctctctttagcatagcgttctctcggaccagggactgaatagcacgcttcatgacattgaccctagcgaatgtacccatctgttcctggagtcgagctgcagcaatccagatttcgtagctggtaggaacggccttgcgagcagcgttcaagactttttgggcattttctggggtttcaagacgagcaagggcaagccacaactcgactgagagaggaatgatttcaacggcctttgccagcagcaagcgcgcatcggcaggatcgtcttctaggttgacagcttctttccaaatctgcaccgattggggaatgtgtagaatagcttgtcgcagaacattctttttggcacgggtgtccgtttctaatctcatggcctcggtccaaagtcttgtggaacggtcattgtttttaattgcattcgctgcaatgatctttgcgttatggccttcattgagtcgaatgttttccagccatgcgtcttcacttttggggcagagctcgcaccctttcgcgattaggttcctagctgccacagtccggccagcaagctcctctagacgagctagcgcaatccaaccgggagcatgtttaggattggtcttggtaactgactctaacaaggtacgaactcgcttgatatcgcccacctcaacttcaccagctttggcttctgattgtgtcaagctggtgagataacccttcgggtcgatattcgtagaggttccggatgcagcctggtcaagtcggaccttcagcactttatcgcgcgccgcaccgatatctgcgaagttcatcatgttactgtcggcgttttctccttcgtcgacagtcgtttccgtgccatcttcggcaattgtcgtgccatactgagctgagtctctcgcgccagcaatgacactatccggaacggcgtagtgccgctgtcgggcgttctgtttgtctcgtcgattcttgcccgtcaaatcaccaacctccgggaggttggcccattcttcttcggataccgaggcgagggtgcgtttcagatcggcaaattggtgttgaattttcgggttattgcgttcgtattctagctgttcggctttctctcgagcttccctgtaggtagagagcgatttaagtcggtattttgtccaaacgaccagagctaatccgataaacaaatggtttcggaggtgaaaatgggagggggaaatgggagggatatgactaacctgcgagctcttcggcgcttgtccattttctcgtctacctcctggtaaatacggtctgcttcgtcgtcttcttggtcgaactgcccgtacgcgaacagcccgacctcgttgtcgggatcctggaaccgctcatcttcctcctccttatcctcgtcttttccacctttctcgcgtgaagtggcgccgtaggcagtgggtgcagcagcccctagaagctgagctctcttggtgagagcagcttggatctgttcgggcgtaggtccctcacgcgccgggccaagatcagagcgagtggtgaatcctgtcgcaccacgacctagaccagcgacatagttttcaggcgctgcctggcttaggaaatcctttcgtccagaagccatatcgagcacaacacaactcaaagagctcgacgccgacggcgcagaaggcgaaggcgggctcggggaaatggtattcccggcgccggcaatcttatcgcaaaaaaagttcccgcccacattgaagtccatggtggtttgttgccgcaggttttctctcttcttgataattgtgaaattacagaggattccaagatgccaaaggttaataaacagaagcgcaataacgcggcttcgcagggcctgtcagatgctgccgccaagacaaaagctgcgcacagcatcttcaagatgaacactgatattggccagcacgttctgaagaaccctggtattgctggtagggacggattttcactgcactataccctactctagctaacaggtatctaactagctgcaattgtggaaaaggctgagctcaagcaaagcgatgtgggttacaaaagacattcattggcttaacaaacactaagagtgtgaatcaacagatcgtcctcgaaattggtcccggtactggtaacctgacagccaagattttggaaaaggcgaagaaatgcattgctgtggaattggatcctcgtatggctgcagaagtcaccaagcgcttccagtctactccataccaaaagcgcctagaggtcattcttggagatgtgatgaagacggagctcccatacttcgatgtctgcatcagcaacaccccctaccaggtatgtacagccccagattttttccaagggttcttcccgggtctaacagagtcaagatctcttctcctctcacattcaagctcctggctacatctccggcgccacgttcatgcattctcatgtaagtctccgctagcaaggctagaagctaccagagatgttttgtgaaattgagagcttactcgaaaccttccacacaggttccaacgtgaattcgcactccgtttattcgccaagcccggcgacaaactttacagtcgactttcagtcaatgcgcaaatgtgggccaagattgatcatatcatgaaggttggtaagaacaacttcaagccaccgccccaggtcgagtcaagtgtcattcgaatggtccccaagaacccacggccgcagatcaactacgaagagtgggatggtctgttgcggattgttttcgttcgaaagaacaagactctccggtccagtttcattagtacgacaagcatcatggaattgctagaggcaaactatcggacatggtgcgcgcagaacgacatcccagtggaggatggcccggttgaagtcgccaatgacgatcccatggcaatggacatggaggagcaggaggaacaggctgtcgaagaaccggccgacgaggtcatggatatggacgacgacgatgttcctgatttcttcaaggagagcacaaatgcccgcctcgaagcagcactcaagaatggagcttcgcgcaagaagcgtggcaaggttgcagagctagtccgtgagaaggtgcgccaggtcctggaggatgacactggcctcggagaaaggcgcgcgagaatgtgtgacgagaatgatttcttgaagctgctctgggcattcaaccaaaagggcattcatttcaactgagcgaatacagaccaagtctgtcccggggaaaaaaagcatccgaaaatagaagttgggaattcggatcatgaattatgattactatcaataagagataccattgtcaggaggttcatcaccagcaggccggaggtgagcacgcgagtcttgaaacaggctttgccagatgaatgcttcgctgagtaagagctcaatgtctttctcggtccaacccttcgttggcaatgcttggaggaacatcatcacctcctagaagacgttagttcctgtttactggtgacgatattcgattacaacatcgtacctggaaatccatcttgaccaattgatctgtccacttgaccaagaatgcagcgcagacatagaggtgaaatcgagagaagccctgctcctcagcctagaataacgatcagtatcatgccagacagtccctgggagaaaacgtaccatgtatgtgtcccacatgcgtatcgtatttttgatgctcatttcccgcatgagcaagcagttcatccatcggaaactaaattgcataaattccacaccttcttgttccaggtgctttgcgagtgctgcatcgatgcgcactgtcaagtctcgtaatgccctgacctgtcggtgaatgccaggctgggcgtatatgtagttgtcctggataccgtcaagaagcttcgtcaaacaccagaaggtgtccgcttccaccgcatctaacacactccgaggcaattggccagggtccatgccttcttcaacgttcaaatcggttatgtaaacgcccaggaagacctgccagaatggtgtgactagatcattgataccttgaacataaccacttgctgggtgtcggatggcccagagataaaggatgcgttccaacgaccgctgggtggcttcatagccatacagcggaatgtggggactggtgcgtggaacatcaatgctaatctggtgccatactgcctcatcaagtcctctgccgcggcccttgcttgaagaggggtttgccgagcttgccccactacctcggtcaaaggcttgccggattccatcaaggtattccttgcgctttcgttccagagtggagatgcgtcgctcactatttgtaggaagatagccaaggagaagctgccaagtcattggccgcacttcttctgggacgcctgaccaagcgagatcccgcagctcagtaggcgataccgtgctcgcttgcaagatgcgcttgaacttgttgatgcgcgtaatgcgactcgaatgaatgtccctctctttgggtgaagcatctatcggaggtggggagtggttgatgaggttcaaagcattagcaggatctataactgtcagcatggtcctaattttccagtcgcctcatacataccatgtaggatgtccttgtattgaggccgaaggatctttccctcccccttgcgagcagttggatacatcggggcaccacgctcttccgcaatatctgaactatccgcgcgatgtctgttggcggctgctaatccatacccaagtgtcgaggggttgccaccactgaaatcaatattctgggccttcaaaggcgcggatctttttctcctcatactagcaagactagggagcccgaattcatcctcatcatcatcgtacacaatctcgtcctcctcatcttcttcttcgtcttcttccgtggggtcgcgactccactcgtcgaccccgtcggccataatgccagggtagagttgtcggggaggtgaggtcaccatgttccctgacttgcgagccgagtttgatgcagcatttgtagccgatgtcttcggaggtgttctcggcgctgagtgggaggaggtaggtctgccaagaagacacttgtcagtcatcgtttctgataaattgtctggatatgtagaatgtatttctagcatactgtacaatattggcatgtgagtaggatgcgcccacaacagtattcgagccatagagcttcgacgatccctgatttaggggcgtacttcggccagcccagaatggcgatgcggcgcgtcttcaaacaacgttagcatccaacatacaccacagctgttccatagctgtaggagagggtgtatagagctttcacttactccgagttgtctgcaaaaaggggagaaaggcgacgtaagctatagctgcgattgaaatgcaaggggaggcaaaagacacgaaccaacctggaccatttcctagggatacagtcagttcaatatcctgcgacacaaggatcgaagaaagccttcgaattgcgacaaaattcatacctgttgcccttttttactcgccatcgtatgaggattcagaggtgtgctcatgcgggagtctaatacacgtgcggggtggcactgtgataggatgaatgccgtatatcatgcaaccaggccatgtaggaacggaataggagatcaatagaccatatttgggagtaatacctaggcaaactcgagttgaaaagcaaatcaaactaatattgtaggttctaaccacatctagataccaagtgcctagctttcgccccgactccggcgtgaagaacgcattatgtaagcaatgcgcttgaactcccgcggtgctggacttcctaacttcttcttccgcctgctctcagcttttcgctgtccagttactttgaattttgctctctgatttactaaggctacacgcgtttccgcgactatctctgcttttgctttattcaacgctcactatttaatcatggctgaccctgaggatggagatgatctcttcgctgatctgtatgttttctacttcactttaccttgaataatgaaattctaatcaggcttctttcatagctacgacgctgatgattccaccaatcgtaccactgcagtcgaggcgcccaagcctactgatctaggcgcgaccaacttggctaccactggagactctgctcaggatttcagacctgaccctgttggcacatacgaatcgcaccctagtcagccttcggaatttgacccgggttaccacaatggttctggaaatgcttatggtgcccctgccactagccaggcaccccctcctgccgagaccgagtctcacggaacaggaattaaagaagacgggtaagtccactaattgcgtttcttttgcattttcatgttcgaactctaccccaactgcatgtatccgtctggttttgggctttacctcgtcagtacaggcctgggtcgcgcaattgctattcatgggttaagtctgggtgccggaaggagtctcctatctgcgggttaaaatctctctgggatgtgggctgttggctgtttgaggaaaagtccaccggttggttgacggcgcacgcgttttcaaccttggaaatgagggagaacaaactgcgggctcggcgaccatcaagacgtctgttcgagggacccattcgcacaaccaccaacgtctaccaagggtgatctacagatcatattgggagtgctccagcatttgctacacggaatcaagcagaggctcgaaagaaatatcgcctgggacccttgatcaagacaatttcttgcgtgaatcaaccacaccccaaccatggacctttgtcacaaacgattcatatatagtacagccgatactatatagtttcctgtcgatataccttgatagggcagagcaagaagtagctatctagcttgagactctgtgttagacaaggcaaaggttttcacgagtcagacagacagacagtgacaattcactttttacgactgaaatacttgcacctcctcgcttctcatctcgcctgtctccggcttgagaaatccagaaagagaaggacatgaattctgcatccaggcccatgtaaaccagtgggcttgacgttaaatccctgtcatgaacatcaaaattgctcaagaccatacaagtatacattgacagtgactacgaggcacaaagatcacgtaccggccaagcacgtgcgctgcttgttccagggccgttgtgcccagaatagcgaggcttttcgtgcactcgaatagcccatgaatagcactacctccccttaccttttcacgttcatttacttcctttaccctaccacattacatcctgtcgttcgccgatcataattggtccggacatttgctctttcattttcatgaacagtcgctaaccgaggacaacacgtggttagaaagatgttcatcggtggtctgaactgggaaactacagacggtaaatctatctttcttacacggtaaatgtatcatatagctgacatatcttgaacgtcatttagaatccctccgtgactacttctctcagttcggtgaggtgcaagagtgcactgtcatgcgagatagcgccactggacgctctcgtggctttggatttttgactttccgcgacgctaagactgtcaataccgtgatggtgaaggagcattatctggatggaaagattgtaagcatcacctcgcaattgggacaaacaaagtgaactgttactgaccacatcaaagatcgatcctaagcgtgctattcctcgtgacgaacaggagaagacttccaagattttcgttggtggtgttagccaggaggctaccgagcaggactttaagcaattcttcatgcagtttggccgtgttgtggatgccactcttatgatggacaaggacaccggacggccccgtggattcggtttcgtcaccttcgacggcgatgctgccgttgagaaggctctctcccgtcctcttgagattctgggcaagccaattgaggtcaagaaggcccagccccgtggcaacctgcgtgacaacaatgatcaacgcggaggccaccgcaacggaggataccgcgaccaaaaccagaacgatggaggtcagcagcaagcccctcagcagggacagggtagttcgatgactcctcaaatgatggcccaatactggcaacgcatgcagcagtactttaccatgatgcagcatcagatggccggtcagggaggaatgcctggtatgaacatgggcgctatgaacatgaaccccgctatgatggcccagatgcaacaagtgcagcagatgcagatgcgtcagcagcagcaacagcaaatgggtgcccagcaaggtgctatgagccccggccctcagagtcctggctcccagcaggctatgcccaacatgatgaacccggccatgatgcagcccaaccaagccgttgctgccggcggtcctgccagcgattccgctagccctgtccccaatgccgttgccatggccgctaactacaacaacggaactccaaactcagccagaggacagactggacctggatacaacgcgaccgagcagatcgccttcgagcagcagaagtatgaacagcagcagatcagccgctcgatggatcctcgcggcttctcgccttaccagcagcagggtggcccaacctcgtgggagggtatgtacgatgaagttcctcaacctcacgttccgactggaccagcaggtatgagacgcatgggaagttcgggtagtggtatgtgattcttacgagtctttgcatattgtgtccctttcatctcaattcctttccattcctactttatttgcgcacatcaactaacccgtctctcaaacaggaaccactcctcagccccagagcactgctcccgccaatgctcccactggaccccgcaacgccggcaagcctggtgcgaactaccgtggcggcggccgaggtggacaccgtaccttccacccttaccagcgctaaagtgtcgttgttgctccttcaaatgatgcatctagtcgcttctcgtttcagatacgatttcgtttcttttatgtgttttctaagtctttttttacctgaggccagcgattttgggcctcatggattgttaattgcgtggccgccagccgccaaggtgacgtggaaaccctgcgagctggttgtattgacaatttccataccctttgacttcactctaaggttatctggtccggtgctttcgtgcttttgttcgggggcgctgacgtttgagaatcaacctgggtcgaggttatccgtgataagcgggaagggaattgttcggtgatcggtgaaagcgagtcttcaactcttgttcgggctcggtgatacactactttgtcttgtggagttagcctcacaatcaaaagccgaaagtgttcattcaagttccgttgtaaatggtcccgtaggtggaggtcaaagggcggaggcgaagagcgattgatggattaaataaaaatggtcgataagactccccagccatgcatgataggtgacttatttatgcgtggccagcgcgacagtcgccaaccaaaccagagctattttgaatattcaagctactgtctcgaaccaatcggtactcggggatgaatttccatatgcttttgagcacagaatactcctttttatagcgtggtgatcacattgatttcatgggttgtctttcagatagggccacgcaatccacgtgactcagatgattgccagttggcatcgttcaaccagttcacggatctcttaggaggtttgctaggcattgtcatatacctgaacaccgaatttccaacatctgaagggaaatgtactatcagggagtacaaagggacttcttcacgagcctgttcagatatatgactcccctcactcttatcgcttccaccatgcattcccatgtttctgtctatatctttgtgtcatctaaggaatccaagttatatatagtgcttaagtacatgagattatgtttgaatactttataccgagaaggatagcatactcgaactcaacctcggactgtggttgggactgttttccaacaatatatatagtagtcaatcataagagatccattggccgcaatgtactcgtctcatcaggattacaagactatgaccacaaaatgattcttcggaaatccaacatggagaaatgctcatcaattgcaagcggtaatataaaatgatagatggtaaacatggtaatgaatgaggtatgtatgaagacaagataaaagaaagaatgaaagtgatatcacacaagaagatgcatctaaaggcgggaagaccagtaaattcccagccgccattttcaagcacgctaaaatccgtcaaaaaaaagtaactcccaagccacagcgcgcgtgcccgatccaagaatatcgagaagaaaggtgagaaacatgggagagagagagggagagagagagagagagagagagagagaaaagaattgtaacgtcatatcaagcctgtgacgcccttcgttggttgttttttattggtttttatttcatttttttaatatgccatcccgtagcccggggctgcaggacgacggccttcgagagagcttcgcgagtggcggctgtcggggcttgagctgcgcgcgtgcgccacgccgtagtcgttattgactaggcggtcgcgttcggtgttaccaggtgatccggcccgcttgggctcgtctctgtaggtctggtaggggccggtgaagttgaagttgctcatctcggcgtattgcttgcgctgtgggtgttccatgaggagcgagtcccgggcgtctaggggagtgaggtcgtcaatgtcgcggtttgctttttctataagaaagggacggttagtaaatggacatgatgggatgggacgtcgctttgacttaccagcttctcttctccgcttagcatgtgggttctcacggtagcagctgatgaaggcgttgactgcaatgaggatagcgaggacagcagtgagagtagactgtacgacaatgaggacaatgccggtgacggtctttgttgtttgagacatgccgagctcttcaacgaagaccagaacgcaagcaatggacagaacacggatgacctgaacggcgatgttgatgcccagtgatgccttggtggcatatgggcggctccacaccaagagtcccaacagaaggacttcgcaggcaagctggccggcgctttggaacagaccgtggccctcgccacctgcgatgatgcagcccttgaccaatgcgtacataatgacggggatgaagatccaccagaagtccttcttgtagttatcgtagaacagactgtattttttccaggtttctttatcttcgtacaggcgggaggtatctccctcggccttcttgtacttgcgagccatgtaaacaatgcgaatagcaaagaagagaagaagcgccgtgaatagagagagggttatagctgctagcagctttgctgcccacgagtcaccctttcgaagttggtagacacagtatagcacccagatactgtatagcacgaggatcatgttggtgattgtccgtgccatcatgccccaataatccttccggaagtcagacagcttgttagggaagtttccatacagcgcccacagttccaggatgaccttcattaaaagaataccgacgacaaccaccgcgataacgatggcgaagatcacgaggatagtcatgaaaacatcggcagaagggaccatcagttcttcagcgacttgcttcaggtcggtgattttgctggtagatgtactttcagtgcttgagctgttcgaaacactagcatcagtagaagtgtcaaccgagcgagcaaccatctcgccgaattggatggtgtactcccagctccgtttcgttgtgttggtggaggatgagctactttgcgtcgtggaggaattcaacaagaactcatagctttcatcggtcaagttaccacctgtggccgcccgaaattggtcgatggacttcatcagaccaggccaagggatcataccagtactccacatgaagttggaggagaagctgcgatagacggaggggtaggcgacactaagcatgccgttggtggccatggaatggaaccagcccattacatcgccaaatccagggctggaggacggtgatccaacagttcccgccgagccgatggcagagacaccgctcagtgccagagcgcctgccgcaatgcctgccgagacgtatttgaccgcagcgacgttggtggtgtggccgttagtcagttccgactgaatgcacgccaggttgctctggctttgcttggatttcaggacaagcttggcctgaccatccaagtcgggcatggtgaatgcgataccagggatttgactggcatatgcggacgggacgtccatggacccagtggccttgaaagaacccttggggacggggcagagttccgcgacatgaatgtcatcgccgcagggatcaaattctttactgtagagttggctgccataggcagtgacggtgatagtcgccgacacattctgttccatcgcgttggtaccagccaagtcgaagacaactactccagtagaacgagtgtaggtaacatccatcttttggacgttgattgccgaatcggtcatgcataggtcgaatccgtccgtagataggacgtcgcttgccagggcttgaggcaccatggccaggcctagcagagcccagatgaagttctgcatgttggccaagcacaattgatgtttgataggtgataccaatctaaatctaacggtttgagccaaggaggcgcgtagtcatcaaggatggaggggatcgactggcgcgatgatcggacgggttgtaaggatatgtggagcgactgtaggtaagtcacaggggggaaaattccaaaggaaaggcaggatcaacccgcgaaagaaatacaaagataataataataataaatgagtcgagagggtcgcaaggacgaggcggctgtgagacactggttttcgagcaaccaggagctgcaaacaagtgaacgagagacggtgaaggagggtggtaggggaagcgactggagattagtgaatggaattccccctctctcaatgcgatgatctgtgaaagaagaaaagagagggaagtctcgtagattacgactttgcgattagtctcaacttggcccctgaattttgagactgattggcctcccgtttcagtctagacctaacactcggcatattactattttccattcggcttggtatttatatcttaatgccattacccatgttattatcccgtctctattattcccaacgatcatcttaatcctgcacaaatctgatctggaaaggcgttgaagtacaccaacacagtggaagctcatatttaaagctttcgtccagaccgtccgacccaaggtttgccactcatgtaaccatggttccagcctaggaggtaacccgaaggagtggcgctaaagttctcccggtcgcccacacccatggaacgcattcctccacaccaatcgaggcacaacaacgccacaccagccacacgggatgccaagttgcccctagcgcgtgcgaattatgatgaattatgattcgaccattcaaattaacaatgttttattacggagtatggagtatgctggtgcaaggcggagatagcggtatgtacctgcagaaccgaaacataacgaccgagtatagactccgtatctatggtccgcttcttcaagaatcggacatccctattagtgcatcttgtgtatgagatgtgccccgcgaggggcaggtttgcagcctgatggaagaaagctgtagggcttaaaactggaccgccgatcgaagatccttgcacaatcccagtcctagacagtggacccttacagggttctggatggacacatacacactgttcttggagaaaatcttgccatactgcatgccaccaatcgagtccgagcactagaaatcctacacatctccgtatgaacgtataacatagaatttgagacttatgtgggttcaccctatggcccgatcatcaatgtgagacaaggctaagcgctggggttccactctcaatcacagagatctattcttgtcgcttttgacagcacagcgtatggcaccccaattattgcgactatcactacggagtacagcagcctcggacctccttccacggtatttattcgttgtccgtatataattccgtactccgtacccatcctgttgctagaaagcagtggagtaatccgtaaaagcttagcagatatttatatctaccccgtaaatgattcagtattatttcacggtttcagattgattgttaccagtaaacaaaccctgggatgatatgaaatggagcaactatgttgtacaaaataggggcctgatcccgtctccaagaagacccactacaacctaaagaatccattaatgaaagcaacataaagaacctcctactcgagagttaaataccaagtgcggagtagtaagtatagttagaaaaaacccgagataaatcatagacgcttctcttaatcccgtcggtaattcaatattgtaagaatacataaatgtagtctataagtccctatcctttacggcacggcataagactttatgattcaagcgtgcaagctcgagataatcattatgttcaagatagtacggatactacaatagatcttttttcaatgtcttgtttcctacataatgttatcgccgaaatagtacataatagttgcaaattgaaccacagactattcgtaatgttaagcataatttctactaggatatcccatgtatagcctgtgatttgtacaacgaaaacatgacttcttcaacgatggagatatactccgtaccttcctattagagccgagtatccggcagaaaatgtggtattcccaccgcctaccacattgtgaccgacaagcaaagacttccatttcaccgcccccctcatcacgtccttctctaggcacaagctcgctaccatggggcccgaggggctcgataagcccgagatcccagataaacctgagaaaagatctcgtcgacgtggggccgaactcgatccattccttcgcacccggctctgtgtgctcagaaccacagccaaatggacctacaaacagatccagaatgaatacccacacatcccactctcgaccatcaaatcgaccattctccgagagagcaatcgtgtcaataaccactcacaagcccgctctggccgaccgtcaaagctgaaggacgaagatcgagcccgaatccgcgaggcttttcatgcgaaccctcaaatcacatacgatgaactgcttgtggtagtggattataaagttggcaaggagtcgcttcgtcggtttctgaatgatgatgggctgaggaagacacagacccctgctcggtcttctttggctgggaaaggagctaccaaaaaagttgatggggctcaatcggttcagtcatatgacacaccttctgctgactgggctggtgatcttgcatctggtctagtacccagcgattcagatcctgcatctgctacagcgagtcaagtcgtcagcaattagacttgttgaaagagataccccgggattttcggcgttgcgcgttactttggaggttgtctgctcaattattcaaccagatttattctgcatgtcatgacaagcataagttatacatgataattatacaacatagagcattggaatgaaaccttcattgcaggattaatacacggcgaacaattggttccgatgaaacatccataatatagtgtgatcaattactgtatcatcaatcccataacctatagaaatgcttgattccggcatcctttgtctggccattgtttccgggcagcttgcttgtatcatgctaatggtctcagataaagtgtggaaattgcaggcaacatgctaacagaatagacccatttctaatcctagacggaaaatgggtaaatcatagccatttggggtaaatgctctacttagatggagttatttttgcagctcctgtggactcaataatgaaatatgacctgaataactagttattttacttcatgcagtcacgttgaaagatggaatttcataccccagtcacgtttggtacttcactatattcgctcttagatatgccaggcggagagaaagaaagcaggggctcactattccataaataggcatctaatagaactcacaggacaagtgatcaatatacatttggctttcatacagcatttggttttgagctttttcaatctagtcggtacattctcaaacactgtgtccatgtcttgtaggtttgattcccttgcggcatttcttgtttatagagcctacgttccaaaatatcctaaagtatacagccgttctataaacaaaggggaaatttgaactttggcggaagagtaggctgacctagaagatgtgatttagttaccaagctctgctgttaatgttagaagtaaaagattcaattactagactctggataattacattcgctcatatgtcacatgttggaatgcaacgcaaatatcaaccagatcaagtcgcgtcattgaaaataataataatagaaagagcccaggctgaacaaagcagcagggaaacacaaattgtccatatgagaatatcatcatgagaacaacaccggacgccggggtattttcctttttcccgaaaagcagccgcctatgcagaaacaaagaaaaatcgctaaataaatgacaaagataagctcatgtcatcgtcacatcttcggccggggtggcggcagtggaaggcacagcggatgcatcagtcatggcatcatctccatctgcatcatgcgcaggggagctctttttcgagtgtgactcaggggtaggagtggcagaatcgctgaacgcatcatcgtcagatccagggtcattttcatctacctcttcccacagacgaacagtcttgtctattccgcagctcacaaccatacgcttgcccttcagtgtacccgtgtgaacacaaagcacagagcccgagtgaccatcgaggcgctgcagaatttccttgctcacaatatcccagaagaggatagagccatcctcgctaccgctgacggcgaagcacaggggctggttgtagagcacgttttcagccccataagtaccgaagcatcccgacaagctgtatttgttgttgacatggccttggaaagtcttgaggacgcggctctggacataattccacatccgaatgcagccgtccagggtccaggccaagacatatttgccgttaggggagaacttgacgcatgtcgcaggcgggttgtcttccatgactagggtgcggagacactgaccgctgtgggtgtcccagatacgaataagtccatccagagcgcatgaggcgattaggcttccatcatgcacaacatcaataccggaaacagggtcagagtgggctggaagagagcgcatgacttgtgctcggcgaacgtcccacataaacacggcctcgtcataggaaccgctgacgaggatgttacccttcggtgcgaatgccatttgatagacgtagttttgatggccatcaaagaccttggtatgggctttgagctgtatcaaagtatcagtaaaaggccctaggacagaaaatgacaaatgagtttcttacagtgttcacgttccagaaacgaattgttttgtcatcggaaccagttgcgatccagacgccgtcaggggcccaggcaagggtggagataccagctagatgtccctcaaagacatgaatgagtctgccactcgcagtatcccagaccctaacagctgcatcggcacctattgtgcaaagtcagttatcaagttatgtagtagctagaccatggacataatatatacccgcactagcaatcatagagcaatcaggtgagaattgcacagccgaaactccacgtaggtgaccgcgcatcacaaacttctccttgtagttcagatgctcaggcttgggaggcaccggagcaacaggcgtcgcagaacgatcggaccagtcatcggcatcaccagcctgattctcgtctgaaccagccacatcatcttccgcgagatcatccgaaccgccctgtgaattgtcgtcacggatgggagaggggctccggtggtggttgcgcatgcgcgaggaacgccagtattcgtctgcgtccacagctaactcgtcagggctctcagactcgctgtagaggcggctagttttcttcgggcgctgtggggtgaacgccttttgcagggtccagctggctcgtcggcgttcagcttcgtcatgctccgagccggcggcgagttcatcggaggaggactcagcgggagattgggcgcgagggtctcggcgccgaggctgggggtttggatgatccattgtacaatagggatatgcaaaagcatctaaacaaacgatgcaaatgcgccgatatgggtttaaagatagcaaccccgaaaataaaatcaatcggacgcgtcgcgaaacatttatcaaggcggtgtatatttttgcgggcggtgagagtgaggcagcttttggtgactgcgtcatattaaaccacgtggacccgtggccgttcacatggattaacacttgtttagcactttattgaccacttcctggtcgactaatacgcctaaatatagctttcaaagctcattctggtcaatatctggcccaatggcctactctattccctccaaagctccaaccgacattcgtgtcctcacattcaactgctggggtctcaaatacatcgccaagtaccgccatgaacgcatgtcggagattgggcggcaattggcaatagccagcccgccgcccgagatagttggactgcaagaatgttggacccagaaggattatgaaagcattcgcgatcagactcgacacatcctaccgtatgggaagttctattacgggggcatatttggtgcgggattggcgattctatcaaaatggccaatcgaggaaagcagcatgttcggctacccgttgaatggccgaccaacggcattcttccgaggagattggttcgtggggaaaggagtcgccagcgcacgcgttcggttcggtcccggtactgctgacgtcgccgaggtgttctgcactcatctgcacgcgccgtatgagcgcgaaccaaacgactcctatctctgccaccggactgcgcaggcatgggagatctctaagctaatgcgtggcgctgcggaacgcggtcaccttgtcatcggcctgggtgacttcaacatggtgccttcctctttcgcgcaccgccttatcaccacgcagagccctgtccgcgacgcctggcgtgagctgcacccggactcatccctcgcggcagcaattgatcctgccgaacaagcacggaatcggcctattcccactgccgagttcaatcttaccgagaatggagctacatgtgacggggccttcaatacttggcgttggactgaggccatgcgcaagcgcctagtcaagggtgaggatattgagattgacaatgagaccccagacccgcgcgccaaacgtctggattatatcttcatcggcgacggtggctacccgcctgcattcccgccatctagctggtcagtccagtcagttcagatctccatgacacagcgccatcccactctcctctgctcgctgagtgaccacttcgccgttgaggctgtcatcacccgttcttctgtacggacataccctccttcccactcttcagactctgccccaagctctcccacttctccttccctgcatgaaacaacttcaaagcccgtctcccccaacgccgccctttctccagacacatatgaccacatcattgacatgacccacacatacgtggcccgtgaacgctctcagcgccgttggcgtctggcgcatttcttggtatctattgtgatttccattggttgcatggtcggcgtgtggtggattggcaaccgcacgtacatcggattcatcctcatcctagtcagcacgctcaacttcgccgctggggttttggatggtttgattggtgggctgtttatgtcgggtgaattacgggccttgaaagagtttgagtgggaggtaagaaatgctagaaacctggtcgttgccgccgagaatagggtaggtgctacttctgaagaaagggacggagatcagaaggattaaaaattttcaccgcaagctggtttgtggaaaggggaattatacgtggaaggtgtggcttgattgcgcggcttaactgtctgtttatatttacttaagtgtagtatagtatatgcccagctagtcttatcctcgactggcaaaactaattcataattcccaagatcaacttcaagatagactacttgtctacagattaagcataagagaattcggcatgaaatgagcgtgtgcatttgttaaaaattcgtcatcatcaaagcgaccgagtccaccagcatcaagcaaggagcaagcagaaacgacaaagagagccagcacgagagagtgcgaatttactcagcacactcgcgcttgcgggtgtcaaagacacgcagagtctcctcagcagccttaacaccactcataaccatagcgccgaaagtagggcccatacggttgaagccgtcgatctccgacagctccataccaccaatgataaggcccttagcgacctcacgggtgttcttaacaatagcgtcctcggccgcattcatgtcaaggccacgcatgccgccgagcttctcaatagcgttcatggagacaagacgcttagcgcagaaagcgccgaatgggccgtcgtggccagtggtgctgacgataaccggggcattgatggtgttggggtccatgcaggagtggtcgtcgtggtggagggtgacgagagtccagttgacgacgacaccggcgaggcggatgtcgttgccgtcgggacgggggatcaggtcctcaacgcaggtcgcgttgaagagcttgacgttcgggaaggcgaggacctttgacaggagcgtcgacgtgaacagcgaggcgtgcttgacgacgacgaagttcgggttcgagggctcttcctcgaagggcacgccgagctcggtcaggaaggcatctgcggggcgacggaggatcatggcgctgaatagctgaccacctagccaggcaccgccacctatatgatatgtgtgttagtggtgctgtggtaggtctacgagagagggacgggtgatcaggtcctcaacgcaggtcgcgttgaagagcttgacgttcgggaaggcgaggacctttgacaggagcgtcgacgtgaacagcgaggcgtgcttgacgacgacgaagttcgggttcgagggctcttcctcgaagggcacgccgagctcggtcaggaaggcatctgcggggcgacggaggatcatggcgctgaatagctgaccacctagccaggcaccgccacctatatgatatgtgtgttagtggtgctgtggtaggtctacgagagagtctgctcgtgtggagccgagactaaccgggcgaaacagaggcctcaatgatggcgatcttcaggtctggacgggccttggcgagtacataggcagtactcagaccacaggaaccagcgccgacgatgacaacatcgctctcggcgtagttgtccagatcctggaagtagcgtcgggtcatggcgcgagagacttggctctcgcggataggggcgaacttgaactcatcccatttgttgccgaactgctcaaggaggtttgactggccatggccggtcagtgtcaccgattcggggacgatgaccttgcccttgatgccggtaggggcaacagtagcaggctcaaacatggcagcgggaggagacataatggttcagagatcaagtcggggatttgactttggaccttggttagtttgactactctatattgggggaggggagggggggggagggcatgatcctttcgctggtattatccagatcaagttaaaggccgtataatctcagaacgaacccacgccgacggtgaacctgatgtctaataagagacatcggattcaccaccgacgcaagaacggacaccggctcatacccagaggttacctgagataccttgatccctgagggataatgtgcccagccaaagaaaatccatggctcccgaaggaagggcagtatgtacttgttcgtttgggatctaaacaagagtcagccttgagggtatgcaagcatgacatggcagtagatagttactgttggaatataaattcgtcacttgattgatgaagagaagaagaagaagggaaaaaaaaaacaactgcgggcaggtcaaccttatatgccaccttggaagagtcataccccaccatccccatcgccatcccacctatcgagatgtcatattgctccgactccctccggttgtccgacgagcttcccggtgagctacgttgcacgaataagatgctctcgagtgacgtttctagcttttctagctcttggctacgaatggccggagcgttctgtcccggacttccttgttttgctccacgagagtaccggtacaacataggtttcctgtgagtacatatggtatgtagaactgcacggtagattcttgaaatagaatgtgggaatataatacgttaatcaacaactcttacactgtaagattgtagctgtcaagcttgtatggagggcgtaggacatcgatgtacgttttactgacggtgactacaatcggaccaaccttgaaaagcaccaaggtcgcagaatagatcaattattatcggaatgaatctacacgaacttgcttggtataaatatgcgaattcaataggaatatatttcattttttcttcgaagaccctatgtgggttttctgacatcataagtcatcacagcgtttagctgggtcatatatatgtgtctatacttaccggatttatttgagctgccgccgcttttatgtagccaaacttcgactacagctggattgatggcggggctacgcgtatttggtacctggtatgggttgctagtgagtctcttgggttgagtatgatgtctttattactccaaaccttatccatataatttcggacaccggaatgtctgcaccttctatcctcgtgaattccccttcggaaaaccctacgttggccttaaaaatgtctgatgactcggactccccagaagtcgagcactcagacgtcgagtgcttcgaggcgctgcccgacgacacagtcgaagccaccgggtcgacggagagtgccatccggaagattattagagaaaaccaagaaacaaccgacgtggtgaaatatatatgtttcacaaacgtcctaccaactattgcggacaatttttctttgcgcagtactcggcagatgtttaatcgccgcactcgatatatgatcatcaagctctttattggggcccatgaaacagcttcatgcggcctgggtggtgcagtgcaatatgagatatacaatatggggctgggcaagtcgattcgcccgttagggtccaaaaccatccaaggtatgttttgcagaaaggaggccgaccgttatggtcgaagtgggagtatcggagtcatatcgaaagctgcgagcagatgcagaatggtggctcataaactcgaggggcgatgtgaagcttgtaattatcgtgtccattagtcgaaagacccccaacatcaagtttgaggctgttactttggacccgactgtcaactccttgcgactgcagtggcccaagatacggcggaccattacggcatcccgcgacgcaaacaaaccctactcacagattaccatcaggccagcagtacctttgatcatcgggtttgaagaattgctttgtcgtcaaccagtcccgcctgaacacgacattgaactatcacctgatcggttgggagggatctcaacacacgtgtggggggagcaaggattctagcttattattacctctatacctctgttagttctcgtagctagcgtcttcaatgacacaatctttgctacaataatcgtggagtgattgtcaaagcgctgtgtagattcttgaagacaggggacgcgacagagaaagatggctgtagaaagaagaagaatgaaggtcatgaaggtttatttagtacatgttatatatttgccatactatttgtttgccatactgtatctcttgtactttatcagtttctcaagcagtttctcaagcagcttctcaagtggttgcttaagcggttgcttaagtagttgataaagtaattgacgataaagtagttaattaagcagttaataatgatatgacaaaagggacttaattttattagtggtttacatacaaattgtaggtacctactgccatactactacatatggcaggaaatatgcctaattgtgcacgcggtactgaaattacaggcagggggggaataacccagtcagaggggcgctttgcgtagcattaaaagttggaatcagtcgcttcgctctgcaacgactatctggaggtcttaggccgtcgagatcactagtatgttgagccgagctctggtttaatcgatgagccgacctgtactctggaaatcagagtgctagatgatgatcaggtgatgcagaatactcagggacgtgctccgttttacccagtgatcaaaaagcggcaagaggtgagcactaaaatggaaagggaaaggtttcgagtgccaggcattatccggtacatatgcaagatgcaagagaatacatgttatccgtaagagaatgcaaaatcacagcacaaaacggtaattggcaccgtaattgtcctccgctaccgggccatccgcaggttttgttgggtcttcttcaatttgaggcccatacttcttgtcaaggcgccggttctcccataccagaagcacacgcagagacaaagcaaggagtgaagtgaagaacatgaaaccagcacagatccccataccctttacatacctcggggcttgtgcatctgggaagatgttggtgcccaggaaaggcccacactggccgatcacgttcaacaggataatacttccaccacggcgagtatcggagccctgattgtctgcacaacgtaacacgtccagtcagtaaaaaagctttgcacagaaaactctaaggatcagaaaagggaatgactcactcagaacccacggcagaatattggcgatcgaggggaagactccacaggccgccaagaacacaccgaagtatcgaacacccactgaggtgcaggtagcgcacaggatataccccacgccaccaaccactgataaagctgcgatcgtcaatccacgctgctgaatgcgatccgccacccaagtggtcgcgatcgtcgccaggaatgaggcaaagaatggaggtgcagtgaggccctgggcgttgatggccgtgaagcccatctccttgagaatggtgggtaggaacacggggagagaagagaaactgacgttacagctgaagtacatcaactaggtacacgtttaatatcagcaagttgtgcgcacaatatacacaatgagtacttactgctgtaagccacgctttgacgtcgagaagcgtcatggctaattccttccattggatcttgactgcacggtccggctcaccagattgttgcattgcccgggcacgcgcaacctccttctcttccttattcaggaacttggcgtcctgcgggctatctggcacgtagaaccaagccagcagggcagctgcgcagaccggaacaccctcaaccaggaacagcaatcgccaattcgccaacgcggaatgtcccgaagtaataccatatgccaaggcaccggcgaatgtatttgccagtggtgcggcagacagaaacataccgcatcggagacccagctcgtggcggcggtagaagaatgatagcagatagggcacaccgggaccgaagccagcctcgaagacgcccattaggaaccggagtgccatcatgcctttccaattactgaccgctgcttggcatgttgccatcaaaccccttttccgttgtccgtcagtccatgttcctatacattcgcaaccccggttgaatgacagcattgcacgtgggtttcataccaggagaacaacacaaaggcagcccactggtgcggcttgacaatcttccacatcattgcttggaattcaaacactgtatatgagatatagaagattgtcaagagccaggcgtagctttttccatcgaggtcgaggtcctctttcatgccggcgattttggcattgctatggtttccatcgtcagcggtcgtgctattttgcatgcaggtccaaggatgatatcgcgaacgaacccgatgttgcttcggtcgaggaaagcgaggagatctggataccacagaaacgggttagagtacaaattcgtttaatgtctggagtttgcagcatacagaaaaatcccaataacgtcacaacatgccagtccaatttccttaccactctccgctctaactcagggtcaatagccggcaagagtgtagtgggtttctcctggtgagtgggcacggcagatttctcaatatcttcatccggggcagtttggattacattctccaactgctcctgcctttccaagaagcccatggtgaattggagacgtcccaacagacaacgggatattaacaaggtgaaaaaggaagagaaaagagaaaaaggtcggacacttttccggagttggggttcggagtcatacttattcgcacggtgagagggaaaaaagcctggatccgcagaggcatactggcgtactacataatacagcgactaatggccagcttctagactggtgattggtgggaactgcagaaacaatttatgcatctattggtcatttggacaggcgaatgagatttcgaggtggagaattggaaactggagaaaatgcggaggaattggcaaagcttaggagagccgctttggtctgataggccgaggtcggggagcagtcggtgtactccgacagtctatatgttgtgctagttatctctttcaagatgaaagtaccttgatattgactgaggttatctatgtggctatttaatagaacagaattctcatgctgtaggtagaaaaaaatgctagtttgtccaagtgtgcggagtatagatctacaccatacttgccaacatcccttgaaatctcttatataaccatttattcatcatgtttgtctatttataaactacatgaataatgaatagtgagtctttcaaattggaaaaacgtaactagttaactataaaaactgatgcctgtaaatccaggtgttctgcatatcaggtcagtaccggggaccgtatcaaaaatctcccgcgtactgtcgcgttcatgaaacaactccatccttcattgctcttgccttatctaccttcatcgcattacaattccgcacttgattcaaatctaatttacacgtgtcttcccaaagcggattgcaaattggcaatcaagcgcgcaatatggatgacccggccacacgcatcccggggcagctggtaagaccccaacagctcccgtgtcaattgccctatgctctgtaacccccccactaacattgtcgcaattatgatagctcccccacatgcacctggtttcgcgcaaccgataccctagcatgcacatgatgccatccgagaccgccgtcgagtatttgacgagtgcaccccggatctgccaatcccagccaatgcattggacattcctcgatggtcccccggatgggactgttatgcttacatggcagccacaaaaccatctaggcaataattttgctagtgatggctatgtctgggccgaccaggaacaggcctttacctttgaatctcgcggctatgtatgcgaggcttcccctgctccatgtggattccattctaatgcttaaggacacagaccgtcgagatgtaccttcaccgaagtggtttccaccctcccaatgagcccgtggcaacacattgccgcaagcgctaccgtatcacctcgtccaaagtaccaaacgctccccagcccgacccatccctgtggattgtgcactacacccgtgcggcgcctcaggaccatgcccccgcaaatcgcattcaagttacaccccaggtccagggcatgatgggccagcgccgtttcctccagagccaaggacaattggcccgcaaggactttttgcttcatgatcgcaacagttggccggttatcaacttcccgcagatggctccccagaactttgggcaacccggtgcttacccagccgctgtgcctcgtggacctggtttctatgccccccagggtcatccaggtgcagttccgccgaatgtgcccgtagccaaaggaccgcgcgggcaccgtgcgccgtcggctgccctcgcttctacaacagccgattttgctgttgaagatgaggacgtctccagtggtgacgctatggatcttttgacgccccgcgatgtcagcaagatgcgataccagcagcatcacgagtggatggaggaaatcttcgcgtcaccatacagtatctcacaaatcacaccggtttctttgggtctaggccgaaagggagagctcgagtctctgactgcgggcttcttcgatgctccggtcggaacctctggcggagacggccaggaggcgggcgacgccccgcaggctaacaagatggagccggctaaggcagaggagttcgccgagcgggtttctaaaaaggtagcgaacatgaccgccgagatcgaaaacttgaagaaacagcatgctcgccggatgcaacgtttcaaccgaacctcattgctcaaggatgccgagttgcgcctccgagagtctgctgctgacccaactgaaacgggcccagagatttggagactggagggccgagtggtcattccaacagaggacgaaacccctcaattggattacattgaagataaagccaagtacagggttgatgaggtaatccgggaagttgagacttcctggaataagcaaatcgtcgcggagcccaaggtatcctgtgtcgagaagggtggtttattggagaagattgaacccgaacacaaagacgagcctgactcatttacaaatgatatggtcatggacgatgattcttcccacctactcaaccaatttggcagcccgggcgttggtgtaggcgcagtctcaggcgtttctgtcaatggacaaccaatccacggcgctgatatgtccggtgatgttgacatggatttgggcgaccagctccacgctggtactaatggccaggctaacgactgggtaatggtgagcaatgacagcaaagaccatggcccagtcggtggagacttcgactttaccaacatcgacagtgccggagatgcgttggcagcttacagcgagcagaacgatgggcttgacttgccagacctggagaattcggcgttcggcgacgcgttccatgcatctgacaatgaacattcgcacaaccccgatgcggacgacatttcctagtctgctccgaaatttttcatatgaaagtgtgtttctttaacgaataattctgcggatcagtcattctagtctgtttcaggtgttgcggcttgctgttcgggagtctggatttatgcaggatgctttagctggttgtgtaccataggattggccgagggaattctctgcttcctctggcttctttttttttgttgcctcgaattgagaggatagagagtgggatctcctatgaatttaatccctatttttcatctatcttccaatgtaggtttcatcgaatgagatatttcccaactaggaaggtaacagttgtccacgggtgtccacgaatattcagaatctggaactaagggacgcctaccttctctatgattatatacttatgtacctatgaagtgcatgaaaccttggatatagtatcataattagctaatagtctaggactggtacagctagctgctagtgtgtactctgatatcgggaagccgagagtggaaaatggccctgaacctttcacgagacaggcttcaaaattgaaagaccatcaccactcacgcataatacaacgtcaaccttgaaatatccgcaatcggaaaggtgatggcatgtatgaactgctccatcgacttccgcccttgcccgttcatgacgtcagtcaccgggactgcacttcctctgagaaagaaaagagaagccttggaagcgaatagggttcgtcaccatcgtcatctataggaaggtgctaccgacttaacattaacctctcccatgttcagttttctcggtttctcatcttaacatatctccccccataaccctaacttgtattgattgactatatctacatacaagaaacaagatgtatgtattctacattctcaatcctcactgtgactaaaaggaagcctaggaaccgcaacctttcattccgatcacgcagggagccccctcgacagcggttcggaatttccaccttccgtggaatgcaagcgccggaattgagccgcaagatgaccaagctgatcaagagcgagaacactgccattggtgcccacgaatctgccggccgcgagcgcacctcgattgccgcccagctctctgaatggggagaggcgactgaagacgacaatgtctccgacatatccgacaagctcggcgtcatgctcgctgagatcggcgagcaggaagacagctttgcgcagaatctcgaggactaccgtagtatcctgaagcagattcgcaacatggaggcctcggtgcagccatcgcgcgagcagcgccagaaggtcactgacgagattgccaagcttaagtacaaggatccttcgagcccgcgtctggtcacgttggagcatgagcttgtccgggctgaggctcagaacttggttgctgaggcgcagctgtctaacatcgtatgttttgattctgacttcgttctgttcttgtggtgaagatagttttgaacttgctaacattcatctcctgcagactcgccaaaagctgaaggaggcttatgatatccatctgacggctgtgattgagcgcgccgagaagcagactattctagctcgccatgctcgtcgtctgctgaactacattgatgacactccggttgttcccggcgatgcccgccaggcgtatgaccacgagcctttggcacgccagatcctcgaggatgccgagaatgatctccgtggatgggaatccagcgttgagcctctcatcaccgtcacgggccgggaaactccggttcatgccaacggaaatgatgccaacggtaccagtgtcaatgaacgcgatgatgtgtcggatggccagtcggatgttctcgatcatgtctctgtggctgagggtttcaccgagccagtgggaagcggtgcgctgcccgcgaggatggtggtgattgagccttcgcctgcgtgatcgtttcaattcttctcagagattcagtggtctcctttttagttcaatgcggacatacttcagctgttatgtgtaaattcggttcttcgcctcagattgggcaccaagacttgctggtgtttttgggaaaggcgttggctggcactgcacatgggggtctatactcaggaaatatgcaaattgtgtattgtaaagtttaattctctaattctctaattcattacttcgtttgttttgttctttattctctttctcccaatatctttcaaagatgatatgaaatgaacatggcgatttgtagtagagcatgcacgtgaccacaggcgccagagtgacgcggaaaccccgagctccagcggagcttcaaccatcaccgactatctcaccagaatccctttcacgtccttctagcatctttttttctaattttctccttatttcctcttccttcagaacacaatggataagcttgttgcccaatactcgcgccctccccatcagaatgagttgtactcagagcaagagcagcaggacctcactgcgagcgtccctccactctcgctgaagttcagcctccctcctgtcgacaacgtgagttcctgatgaatactatgggagattctcttgcgactggatgatggcggtttggtcggggatgtacatctatcctgacgtcaacctaagctgcgccgtcatcacagctatgtctaagagaatcgctagccagaaactatacatgattgaaaaaagcgaaataatggactgacgttcatttcttatatctagcactctgctttcctgcgtgcgatgaccgatgaccactccaatcccagctgtcctatcaagctcgcccacggcacaacaaccttggccttccggttccagggcggtatcgtacgttttcctatatttcggttacaccatgggtttcttaattttggagcattttgctgattgaaatattgggttagatcgtctgtaccgattcacgagcgacagccggcaactggattgccagtcagacagtcaaaaaggtcattcctgtatcgcggttgagtcggggtgaggacaagaagacgaacgagccgacgccaggtcttctgggaacgatggccggtggtgcagccgtaagttggccgcaagctaatgggtgatggcgtgatggatgttggttgctgatggttgtcgcaaattgctaggattgccaatattggttgcgttatttgagtcagcagtgcactctgcatggtaagtcagctcgattcttgatattttcaggcatggaaggacatggctgatgaatttctatctagaaatccgacacaagcgccgtatcactgttgcggccgcatccaagatccttgccaacctcacttacgcctacaagggatacggacttagcatgggaactatgttagcaggagtatgtcctatacaccattcatagccatgagattcggaactgacaatgatctctagatgacaccccaagaagggcccgccctttactacatcgactctgacggcacccgcctcgccggtaaccttttctgtgttggatctggtcagactttcgcttatggtgtgctggacgccgagtacaagtacgagctgactgtggaggacgcattgaacctcggccgccgggccattctggctgccatgcaccgtgatgcctactccggtggtttcattaacctgtaccacgtcaaggaagagggatgggtgcaccatggattcgacgacatgaaccctatcttctgggagacaaagctccagaagggcgagttctccaacgtgacatctacgttgtaaatgggtctagaggaatgaatgtttctgtttaatattgatatcgatatgccattgaattatgcttaggtttcaaccaacttgtgtgctaggttcaatcagatggaaggcaatagctccatctccctatagtagtcacctgtctttacaaggttctcctggcctgcttcacagaatatcggttcccaactaaacagctagttgcatagccacctcaatatgtggaaacctccctctaatcaatctaaacttatccaacagaatatccttcggcataacctgcaaattatgaaaagaaagcacaaccccctgcataaaaacaatatcatcaatgcgactcgtcgtctcctcttcagtcgcctgcggcacatgaatcaccacatccgcaatagtattaacaatctccaacaacttgctaatcatcgacgagccatgcacccgaatcgtattctgcgagatcttcgtcaaaaactgcctgagctgactcgacaacctcaacggcatctccagctctaacgacggacacgacgcatgcgaactaagcaaacaattcgacatggccaactgccacaacagcgtccgcatccactgccgcgtaaccaccaaatccgcctgctgcagctccgacagcgccgaaacctccacctcccacaccgcatcatccaactcgcggtgtttccgctccacccacgacgcagtgacctgcgtgcggtccccaatccacagactcataaacgacgcatccagcatgcagaacgtcttgatcacctgcgtccagccgagctggatatccgcgcccacgaacgcgtcttcttccgggtactgggtgtgcgggggcagtgtcaccggggagaaattcacgatggataggaatcgctcgtggatgaagcattgccagtacagtcgttggcggcgggctcgctcagccgtgctgaggctggcattgacggttttgtcgctgatgcggagcatctggatcatgctgattgcttcgcgtaggtggaagaagcctagatcgtagtggcctaggctcatggcgcacatctggatgaagatgcatgtggtggcgcgtaggattgacggccggaagcctattactagtggttcttgggtttccacggactggcgcattaggtctgttatttgtgttgaggttggttgggggctggatttggtggtgcattgaaaggaccgcgtgacatccagggttactgcggtgaaggcgtagatgaaggctgcgtgctctctttccgtgtccatttttgtgattgatgtgcgcacttctgtctcggtgattattgggctgaatgggtatacataggacatgtatgctgggagtaggctttcgaagtatgagcttggtagttggattgaggctgtaggtgctggtggagagagatgtggtgtcaaagtggtgggtttggtgttggtgtttttatatttcgagatgacagctcctcgacgtagtgaatgttttcttgatcgcaataaacggttttctgtgtaggtgcactggagatccaggtgctcgcactgctggcatctttgctggccattacaacgaactttgcggcgattacacgggtcacatgcttttggcactcgtggctgagaagttggactagccatttttttctttggctctcaagagcaagtgtcggaggtagatgtctagtcggaacatgtacttcttctccccgcgttcgatgttggtggcttggcacttaagactctttcagcgtagcgtcacggggttattctccgcatatatgtaccggataattccaatgagtatctatttgtgagtacatctgcgcttcatcgatatcgcaaagcaagctaccgaccatttaacctcacgggtcaccctcccacatgctgtgtatatatgtatagcaggggaaaaggaaaataccaaaaaaacaaaaacatacaacagtgaggattcgctggtggtcacccacccaactactaacacaccggcgtgtggcttgagtacggctgagcggacgggaagccctgttttccacaccctatggtcgtatgtaccagtttacgtatcagaaaggattaaccaactataggatagttagtttataatcaactagaagaggtgggtgcacaatcgacagggtgagaatcgagctccatagaatcccatgtttgagaagttgtaacaagaatgtacccctttggtcggtagctatgacaagtatgtcctttaagcctagcgaggccatatacctcgttcgacatttagtataccatccttctgcctcaataactacttgcacacgtcacggcatataaccagtaaagtactcaagacgattcttcctttttgacagctggtataatagtaggagggggccacttaagagcacccactgtacatacgtcgatggagactcagaaatttcacgtgactctcagtctgtattcaactgccaatagcacagtttgaaaacgataccacgatgtcgtccaaaagtaccgtgcgactgatgtcgccaacgtcgagtacgctgcgacggacctttaccttggcgtcatcaattatttctactattctgcggctatgccaatatacatacaactcgattgatagatcgaaagatccacctcaggggatctgcaccatctgcgacaccccagagtgaaagctccaccgttgtgaattgtctccattcgaccacgtggtctgcatgaaataccaatatcccacactgaagaacacgtatgactcggggttgtgccgaatggcatccgccctggtcatcccatatatactggttggcaaaatttcgatttcatcgtacttatccttgtaggcttcagttatgatttcgtcggggttctcaagcagtagttgctgacggacccaaaggtcttgatgcgagaaagcattagctagcgagccatatagcatcaaggtgattcaatcccgtgaaggttgcacttacacgtaacgtcaggggtgggatcattgcccagaaccaggtgaaacaattcatggtagagcgttgcgctgcgcggaaggacgtccgtcagtttcctccctcccctctgcccgacaagaggactcttggacccaagcttcacgctatatcccggctcgctaaaggacccttgacacaaggtgatcgtgggcggcgtggtcatatgctgcgtggtgcccatgttggcaccgcgcgccacggtgcagaaggtttgcccatcatagtcatcgtctacgaggtactggcccaggtcggcggaccagtaagggattcgctcgttcttgatccaaatcatctggtcctcgtcatagtcccagaaaaggtgcctgtactgatcgcagttttcgatcgcgaggagatgctgttgcccattgtcgtccattgtccagatgtcgttgccttctatgtcccgggcaatgtctgtccgtgcacgcttcttgagccagttgtcgttgcagtacaagcgtggtgtgttatcaagtgtcgttcccgagaggaagttggacactttctgtagagaacctggaagcagaccctgttagccatagccatcctcaaccggagatttggtggagtcttgtacctttgataagcgcaagcgctgtcgcatcattctctccaacaccaaagtacgcccggaggtatcgcttggcgacatcgtgctgggcagcagaggaatcctgcgcatgcgtgatggcctgcaatccggcggtagctaggtctttgctttcttgcaaatactgcgcgagcaatgtcgatctttcgctacagccacctgcttcatcgttatcgagattgactttgaacaatgagccgattgtctggcccgcagcaagggacgccgcggaaagcagcccgcacacgacaattggcttgagctgcatcttggatttggtcttcctatctccggaaaatgcaacagcagcgaggaagaagattttgacctgaccaagtgatctttctgttctggttgcccctgaaagccggcggaagcatccatatccactagtcgccgaggcgagactgcgcgagattagtagtaaattgcatacaacatactagtctaccacatgcagtggtatctgcaagctaatagggccccacaaatggggtctatgtccacaacatcagagctgcctcggcaacgaaccagggtcactatccctatctatatgatccatatctaccggaccatttgccatctcctatggagtgataattggtactcctcaaacgccgcttctctctgccactaggaccagaatgccttccatgcaccccctttccctcctcaccgccatcttggcctcggcgctggccgagtcctcttcgtcctcctgctgggacaccatgcacaactcgaccctcgcggtcttcagcagcgcccctatcgccttcagtctcgaccgtgctaccgcgttgcagtgccaagcgtggtgcgggcaagtctccaactgccaggcatgggtgtttgtcgaccaattgctgcaatgcgacctccaccgcgcggccccggtgaacgttcttcccgagaccaacggattcgtcttcggtggctgtgacccttccggcgcggtcctggatttgccaagactaatatacgccgagactatggtcgagggcgcagcctcgactcccactacccaggctagtgcgatttcactcgccagcagctcgagtggtgctaccccggagaagactcacggggtgcccgagtcggtatgtctctgttagcttcccagctgtgacccaacggttgactgactcctgtttttttttctcgattctagattcatccgaaggtgaggcgccatggccactcgcgccattcgcgaaatcactggcactaagccaggcggacgacagcccagaggctcaggggcgtgattggagatacggataccgtgtggggcccatgtcatgcgggacgtacggaaagtgtggtttgcatggagaagtatgttaagcgaggtggtatttgggggctagtttttgttccagtaaaacccttggcaactttagcgtatcagttgaatatccgtaccgaggtactctccattgaagacccacactgcttgagaaaccgtagatatgggctcgaacaatcgcctgtcattcttggaaatcggggatagataacccccaatgccggcgaacggtgattcagggacacatgggtggatactgaggggcaccggcgtcggccggatgaacagggtctttccagataggtatcaactccggagactagccctagtacatactccacaccggtatctataccatcagtagcgtcgtcgatggtcaaattgctgttccacggacgtaatcgtcccggattcaggggggattcaatatagcgggctcattcgaaacctggataccggcagaaagatccagatcaggccccagaatgggctgccatatatacaagaagagaagctcgccaaattttgacttcttccccctgttctcattcttgtttagcgccctccgccatggtctccttgctggcttgggccacggtgctgctgctcgcctgccgagtgcagctgcaagtacaggcagcggccgtcttcgcgcactttatggttggcactccgccgtattctctgtcgtctgttctcgctgaccgtgcaggtcacaaacacggccaactatacttctaatgactgggagaacgatattcttctggcgcaggatgcgcacatcgacgcattcgccctcaacatggcgtatgccgactcgaccaacacgggtgccctcgctgccgcgttttcggctgccgatagtctcggcttcaagctctttttctcctttgactacgcaggtaacggcgactggcctaaagccgacgtgatcaccctcattcagcagtacagtgctcactcgtcctactacttctataagggacaggcctttgtctcgacgttcgaaggccctggacgcgccgacgactggcccgagatcaaggcggtcaccggctgcttcttcatccccagttggtcctcgctcggagccaagcctgccgtggcgatgggggtcgtggatggtctgttcagctgggcgggctggccctggggcccccaggacgcggacacctacgtggacgcctcgtatctccagtatctggagtcgctgccgtacatgatgccggtctcgccgtggttcttcaccaaccttcccgggtacaaaaaaaactggatgtggcgcggggaccacctgtggcatgatcgatggcagcaggtcctatacattcaaccggagtttgtcgagatcatctcgtggaacgactacggtgagtcgcactacatcggcccgctgtacgaccaggccatggaagcgtttgaggtcggcgaggcccccttcaactacgcgacagaaatgccccacgacggctggcgggcaacgatccccttctgggccgatatgtataaggatggaacggccgaggtgactgaggagacgattatcgcctggtatcggcttacccccggcgcggcctgtgacagcggcggcacaagcggcaatacggcctcccagctgcaggttgagttccccccggcggagatagcccaggaccgtatcttcttctccgcagtgttgggctcgttctcgggcgccgtagtgtcgattggagactggacccagacggttgggtggttcgatgtgccggatgatgatgtcggggtatactacggcgatgtagccattggcgcccatcggggtccggtgactgtgtctttgatgcgtgataatgtgattattgcgacgattgagggcaaggccatctcgtcgacctgtgaacatggagttcagaattggaatgcctgggttggaagtacgtctaccggggagaccgtgtcggcacgaccgacccgtcttctgtcagagcaggtctgcatgaacggtaccggcgcgaataattttgccggactgtgtgggtttgcctgccgatacggatactgtcctctgggcgcctgtacctgcacgcgaatgggcatcgggtacgagccgcccaactccacgggtgtcctcggatacccgattgtgggcgaaggcgcgagttacagcggactgtgctcgtttgactgcaacctgggcttctgccccgagagtgcctgcggcactgtggaggtcccgctcagcacgccgacagtctcgccgttcctgccccccgcctgtgtgtccggttcgggtgagggcaacctagctgggctgtgcgactttggctgtgcccatggcttctgccccatgaacgcgtgcacctgcacggggcagggggcgctaaatgtcatggatccgacaagcgagaccgttgggaccgccgcaccgggagtagacgctaccgtctacggtcctctgtgcgagtacacttgtcaacgcggatactgtcccgaaggcgcctgtatcgtcgccgaggactcggactcgggctcggggtccggggatggaccaggcgatggcgaggtctacattgccccgtcgatctggaatatgccctcgccggtcgtgcaatgtgagcctccgtgctcgctgatcatgcctccgctgcagctggccagcccttctgtaatatccatccctccctgggagagccccgtcgagcagagttacttgacgaccagaacgactacctatgacgacggagtcgtcgaaacatacaatggctatgcggttgccaccaccaccattaccatatcctttcccccttgtacgtgttgagccctcctccccaatccaccctcactgacagtccatcatcagcggtcgtcaccgagatccccgtatggggagtgaccatcaatgccagccaggctcagccaaccgagttggaaatgacgaggagcatcaccctgccctatatggtatggtcgcttcccccgttcgatgaagaccccaacgcgacaagcatgacggggacggtccttccgcccccatatccatggtcccaggccagcaaggactccgagctcaataccgcgaccaccacctggtcgtccggcagtgcgactcccacggcagataggggtaacccggacgtcggcgtctcgtgtaagccattctgccacctgtgtctcttgtgccgcccagactggagcgggggcggcggcgggggctccgacgatggcagcaacagcaacagcaacagcaacagcaacgaggacgagtgcagcacgcgagaggcggagatttgctctaccgtgtgtgtggccgggtccgggtgcgagttcgactgctccacgaccaccggctgttccgtcacggcctcggccaccagcaccgtgggcacgcccgcgcccgccgtggccatcacgctggagcaatggcctgaagccaccgaggagcccgatgcagaggtgaccagcatcgctcggtcgctcgactcccggctctccgccctgtatggagacctcaccgtcctaacgggatacgaggatggagccgccacggccacggccaccagcaccagtcgcgcgaccacgacgaccagcgcccccccggacctcccaacctcactttccgacctccagttcgtgatcttcctgcgcaaacccgccgactccctggactcctggacctggtccggctacctcctcccgacgtactacgacgaggagtacgtgtgcaacaacgcgtacgaggttgtcacgagcaccgataatatcccaaatcaaacggatgaggactccgactacggatacccgatgtatctgggtccgtttgccgcgcaggatttgaactgtgggtatgtgtcccaaggcctgacgccgggcgacgtgcactgcggcactcaggtactgacgtgcctcgagcttgatgcgctgcatgctctggggtatccggggtatacttgtgggaatacggagttttacatgcaggcttggtgcccgatggcagactaaggccggtggttgtgtaccataagactgaatattattgcgtacgagaatcggcgtcgtcatgtaatgtggtttaccccatcagcttttcgtgccatggagttggttttcccgcagaaaatatcccaaagcggtaactttctgccctggtggatccaacttcttctgtgcggtccaatattattggcatccacgaatatgaagcatttggcaccatacaaatttaattatctcaactttttcaggtggtttactggctctctccgtcatgcatgatgcatgaagcaatttgaattaattctaccaccaccaataataaacacggtttaattccaaaacagtcatttagatactatatggtagagagtagccaattgattaagggcattgttgcttatgcccccccccttggatgctcacaccctcccctgccttaaatttcagtaccgccttcctgatcgggtaccactcagaatactttattttttctgccatgtattctgcctacttctggtttatatagtaaaaagacatgcattttgattagaaaaaatcgtatattcaacctgatttctatagaattcaaccccttgctggatgagcagttgatataggatgtgacagaagtgacttaattttggtaggggtttacatacaaaccataggtacctgctgtcttgctactatcatatatgccgtttagaacaaaagcggtatacaaattaggaggcggtgaggagagcggtaggcagaagcaagtatcgaggtaagtgcttaaccaaattaggaaggcggtactgaaaattcaggcagggggtgggggtgagcaacaattcccttgattaaatgcgaccggcaattcatcataattgtagtaaaatagaattaaaaattctttattgttggtggtggtggtaccatttgaattacatactccatggtgatggctttatattcatatatgacggagagagctagtaaagcacctgaaaaagttgagatgattaaatttgcatggtgccaaaagcttcatgatcatcatagggcctggttaatccgtcccggcatcatttagataactacctaaaagcggtctaagataaggccaaaatccaggcatcaaggcccaatctgctgtcggagcgagaaatacaccagttattcttactgagaaggtgtgcacctttttggcctagtggtaacgtggcctgtttttctccgacatctggtgaaaacgacccctctttcctgccgccccgagtaaagtaccaacaacctatgtcggtcaaagcgaatatttcaagacagaatgagcaccatcgagcagtgtcctgctgagacaattgataatatcgtctcgtttctcaacttgcgcgatatttgcaatctccgcctcacgagccgcggtctggcactcagggtcttcggagccccgtctttcggatcccacctagagcaaagacaggtcgacgttacggagcgcagcctccgggccgtagccgaggcaacagcaaagcccggccgactaggttgcttcattagcgacttggtactggtcggcgtggtgaacaacactaaattcctcacgcaagaggtcaagtatactacaggggacgcaggacatcgcgcaaagcagcagcaggacctcgagatcctgactcgacggcaaacagagtatgaaaccctacatgcgtctcgcggtgatattctcctgctgagtcagatattccgcaacctcatggcccatggtaggcgccggggtctccgctccttatccctgacagtcgtggtgtatcgcgaggacgcgcagacgagactgctccccaaagacgggttcggctggaccctgatctggcaggctgccgccgacacgttccttacggcgctggcggcattcgcggcaagtgggatcgcggtacagcggctcgacgtctacaacagtatagagcggtgcagcctagcgtgtaacgagcctagtgccgtgaactttgaatacaatatgctagcgacgtcactcgcgtcgctgaaaacactcgccgtaagcttttcggatcgggttatcaatgaaaggacagaggatctcggcctaacaggcgacccatcggacacgtgggacgagcatttggaagatgagttgagggaacgtgaagatatagagaatgaggtgtatcaggattcgacgtttactggcctccccgccctggtacaacgctgccgggggctcgagagtctagaactccatcattatcaacttaaggatctgatcctctcggaagaggatctgatcttctcgggactcaaccggtaccgtgaacgattcttcccgtacatagccgagatgatcccgctacctcccttgaagcgcgtcgttctccgcggattacgggtgagatcagcagatatactagcctttatacagaggctacagccaactttaagagagctatcgctgcagcacgtgattctcctcgacggggcaaagttcgaaactatcttcggctactgcatatctgaggaggctggcttggagcggttgtacttggaccatttgctggagccagtagtgatggctagtggcgcgtacaactaccgtcgactggtctactttaccggggaacctaaccaggagcctaagctccggcgcagggacctcccacaccgcggtagtaacacagtggataggataggtgcagcacaaatcaggcggcctattccgtacttctcagtctctgtcccaatgagagaaaggggcaataggcttggcgcccattatccgcacagcaggccttacttgtctctatgtctttacgggcagcgggattatggacccccatgagtcggtacagtgatgtggcatgtgtatatatagtatagcttagatagtcgattgttttgatagagcacttcagggcagtatcaatctcagcgagggctacaaggatataggattgtttctcagtggtttactatagaggtttagaagtagactatagacgtactaagtcagcgccacgggaagtgtctttcctttaaaactgggcagtttcacataagcttaagggggcgaagcatgggaatggctttgtcaggcccgttggtgggcggtgatggcggtgagggagttcggtgctcaaatccccactggacatacgtcgatggagactcagaaaatttcccgtgagtttcagtctgtattcaactgccgatggcacagtttgaagacgataccacgatgtcgtccaaaaaagtaccgtgcgactcatgtcgccaacgtcgagtacgctgcgacggacttttaccttgcggcttctgccagcggacccagcttacctgcagacgtgaatacgtccggaaaaagcgcggtccgaaacatggcagtggaaagaagatagaagcactaagggctgctcaatcacatgtcaaggaatataataatagcgcctgccaaccagtggaggatctcctatctccagatcatttgccacggctgatgagacgctgtgtcgacgtctatctacgtcagatgtacccgatcatgcctcttttcagaccatctattctaatcgaatggctcaatcgaccgatggaaccaaatgagcaaactatgttatttgcgctatgcgcattggtcaccgcgtttatgtgcggtcgcagcgaatccattatcgggtgcggagaatgggcatcagtcgcgcatcggttgatagaaaagagcaattcggtgcggtctgaatataacttcgtcggggacagcactgttttgacgcttctagcatctttctttatcggagttacgcactttgaattgcataatgctcgacaaagttggttctacctccgcgaagctataaccttggcgcaggcacttggcttgcacacggacgagttctaccgtggcatggattatataagcgctctgtactgccgtcgaatttacaacattctgttcgtcacggagagatctttcgcagtagcaagacataaaccggtccttctacctcgcccgttgctttttcctgctcccgggccgaacgatcaactagagggcctagaagaacagccagaaattgacatcggattccgccagcttgtgcacgtttattcgcagatcgatgtcaactttttggacttctggagtgaaaaggagacaatcggcacaacccattcgacatggaaccttttttgcttaaagttgcttccggactgcgtcgtgatgtctgacgctcataaagctgatatctttgtgacccagcactggcttgacctggttctatggagagcggcccttcggcaggggttactttctaccaaggcgggatcacggtctaggacgttttcttatccacaggatattgcgttatccttactacagacattgacatcgctctctaaagagtcagtggcagtacatggactagggattgtatgtgtcacaacctgtttctacattcgcctgagctaaccgtacgtaccagttcgaaaaaatatacgacgtaggcaacactctggctgacttcatgcattgctcaagaaatttgacaggctggacagaggcaatgtcacagaacatggaccgactagactcaattcaaaaacagctctctctaagtccaaactcccacgataaattcgccctgtctctaggaggacgattggctgagtattctattttctttggtagcccttttaccatgtataatttggtcattagagacgaagatgtggaagaccaacgggatgcatacaccctggaatgaaatatttatagtcatgtgtatttaatgtgaatacggtcatcttaattgtggattatgtacaaacatgtctgatcccaaaattctcagttagtaacaaccaaattgttgtcataactaactacttgcggcgaaaccttcgctgaaattctcggagagatcccggggaattgttggcagatcaccccggatcgtcgagccaatcgctgaattgctcgctgaatctctcgctgaattaagtctctcggaaatttagaccaggaatttgatatcaaattataaatatccttccagagtgtgtccaaaaaaactgcatgccgaatccatgccgaacagttgaatcatggcctttccgactaattctgtcgccaaccctcgggccgtcatttctggtccgaaatatcgctttaccattctgaccgatttcttgattcggtacgagtgggcttctgatggatgtttcgaagaccgagcgtcaactttcgccatcaaccggcactttccgacgccccaattccgcgtcgtcgacaacgatggtaatctcgagatcatcgccgacaatttccacctatgttacgataagcaacgattctcccctgctggactgaacgtccatttcaacttcaaatataccaactggggggctccatggcagtatggactcgatgaggagctcaatttgggaggcacagctcggacccttgatctttgcgatggccgttgcgatatgggaaaaggagtgatttccaaagcaggatatgcggccctcgatgactcaacatctatgctcttcgatggagactttgtggcgggtcggaaaccgggtgatcgtatcgatggataccttttctgctacggtcatgactacaaagcggcgatgaaagcattctactcagtgtccggcaagcagcccatattaccccgatatgctctaggcaactggtggagccgatactatgcctatcaccaagacgggtatgttcaactcatggatgagttccgtgcacgcgatattcccatgtcagttgctgtggtcgacatggactggcatctcgtatcagacccttctgtaccccatgccggatggaccggctatacctgggataagaaactcttcccaaatcccaagcagttccgacgtgatctgcacgagagacatctcaagatcaccctgaatgatcatcctcacaatggaattcattcccatgaagatgcatacaaggaaatggccaaagctctgggtcacgataccggggaaaagaggccaattattttcgatccctctaaccccaagttcatgaaagcgtacttcgagatcctgcatcgtaatctggagaataccgcatgcgatttctggtggattgactggcagcaaggcccgtactccaaagttcctggcctcgatcccctttggcttctgaaccatttccactatctcgatcatggacgagatggcaacaccactccccttatcttttcccggtacgccgggcctggaagccagcgatacccagtgggattctcgggcgatacagtggtcacctgggattcgttggccttccaaccggagttcaccgcaacagcgtcgaatgtaggttacgggtggtggagccatgatattggcggccatatctttggaggcagagacgacgaactcgttactcgatgggtccagctcggtgtcttttcgcccattttccgtctgcattcttctgattcgaagtggaattctaaagagccgtggatgtatcgctcggagtacaagaaggtcatgtctagctttatgaggttgcgacatcgactggtaccattcctgtatacatgcaacgttgtcggttctatcgagaatgagcctttagtgcagccgatgtactggatgtttccggactctgatcaggcgtacgtgtttcccaatcagtatatctttggctcgaaactcttgattgctcctattgtcgatcctcgggacaagacgacaaacttgggggctgtcaaagcatggctgccacccggtccccggtttgttgacatatttactggccaattgtatgacgcagaccgggagatcacattttaccggagactggaagaataccctgttctgagccgtggaggaactatcattcctatggatgccagcccagcgcccggaaacggttgcttgaatgtggaagcgttcgagtttcttgttgtcatcggcaacgatgctgaagccattgttttggaagattttgaagacgatgcacccaattcgacggcaggccaggggcaacggaaatttgctgtccacttcaaccaggctgacggaaagctgaccgccgaatcaatcgaccggccctcgaaattccgatttgtgtcgttgacgtccattccggacaacttgaaaatttactgtgacggcatcgaccggacgaaagaggttaaagtgtccgtcgaggagggctgccaggcccctggtctcgtcattgaatgctcattctccaaaattggtcactgcatcactattgaactcggtcctaatcctcagctcagcgtgatgaatccgatgcgccgtctcgagcctctgattatggactatcaatgtgagttcgagattaaagacaagttgtggaaagtcgtggcagaccacatgaaacgtgttaacgctatgattggcacgctgctatcgcttgggtacgatgactctatcgtcggtcctgtgtttgagcagctgttggcagatagtcggctatgttcgccttttgctaagcggacgtaggccgacggatcagctgtatgcacctcaaagggtcttaagtgtattttgactaagaagttcaatttatgatgcacgttttatcctcagtgtaatgcttgtattttctacaacaggatagactgacgagtaagatcatggtgtctacgcagaaaactgatagaaagatctgtttaaagcaatcaatgaagtatatttgattgcaatctgccatgatgatgtcctctaagcaatctaagtacgagtatctaaagagtaatatatcccagccctaaaccaaaaagactcttccctcaaacgcatgcaagtcctcattgtgcccatctacattgctagccaacaatttccaattttcgctcttcacggaatcaggtttctcaaacttctgtgttgtatttgagaagttgagaacaaccaaaatggtctggttgtgatttgtcttagtataggtgaagacactctgatttggctcgtcgaggatctcaaactctccaaagaccaggagatcggcatactcttttcgcagctgattcatctgtttccagaaggaaagaacagaagatgagtctttctcctggagcttcacattgatctcagggtaattgtcatgcgggcgcatccacggctttgccgatgaggccggtgaaaagccagcattggcatcagcactccactgcatggggagtctggaatgatctctcgccaaatgctgcagagcatccatcgccttgctcaactcggctgggtcgttgccggatttttcgcttatcattcgataatagttgatgctatctatgtctttgtattcgtcaatcgtccactcccgaggcgcgttcaccattccaatctcctggccctggtagataaactgcgtgccggagagagtgctttgcatcatagcaagcatctttgcagaccgaaccctcaactcgggtgtcttgtcagagccgaaccgactcacagaccggccctggtcgtgattttccatgaacactgtggtccatgcatcagtgtccttgatgatatcttgtgtatttttcacggcggcttttagttctcgtagattccagcccggaaaattggtctggaacttatagtccttgccctggccgaggtccacgatgtcgaattggaagaccatgctcagctgcttctctgccgctgagacatagctcagaaccccttccaaggtatgcgtgtttggcaattcaccaacggtcattgcatcatatttggaaagcacgtcgttcatctcgcgcatgtactcgtggatgcgaggaccgttgcagaacagcgaaaaagccggctgtgtgtcggactttggatcaaggattggagcattgggatagtcggggtgcttgctgtacatgttgaccgtatcgacgcggaagccatccacgcccttctgcagccagaactccatcgcatcctcgtagactgccttgcgagtctcggggttctcccaattgagatcgggctgctcaacacagaacagatggagatagtattcttctgttgtctcgtcccacccccacgcactgccaccgaaaacgctgcgccagttatttggcggctgacgatttccattcgcgtcgtatttagctggcttccagatgtaccagtcgcgcttggggtttgtctttgaagagccggactctttgaaccatttgtgctggtctgatgtgtgattcacgactaagtccaggataatccgaagtcctcgcttgtggcatgcgtcaatgagggtatccatgtcctggacagtaccgtatgggccatatacgcttttgtagtcggcaacatcatagcccatgtcaatctgcgggctgtcgtacatgggacacagccaaattacatccacaccaaggcttgtgatataatcgagggatgagataatccctgggatgtcgccaatgccatcgccattagaatctttgaagctggcggggtaaatttggtagatgatggagtttttccaccacttttcggccactatagagggagacatggtgaatttaagggatttaaatgcaaggaatagtgatagaagaagaaatataggtccaaaatacgaaaaactggggaggctatatatacgtgtctaaagcattcgatttttgattgtcattgcactacctgctcgactatggagtctccgatatcacgtagggagggccattgctctcattgactcgatgtcgggccgacgatcatttcagcagaatcatgtgcccctcatctgcctgcgggtctttctgtgctgaacgagggttggtggtgtttcagtatggtagagattcccacttaatcccacgatccggaaagcataccgagctctccaaccgcctgaccatatcagatgccgagattgtctatgccgattcgtctcttctttctgggcctaactcacaatgcgttagttcatcgcagaaatgaggggaacagaagcatgtcgggccgacatctcaccaatgatcccgtgatatcccccagccctatctaaccggatcgggaaaagcaacagccctaaaacggccataagaaacacgcgagacacggctggatgaaaggagccaatgcggtgacaggactaaatgcctcttcattcctgcacggcccgacatcaggccaatcacgactctcccagaaaatccggggatagtgggccaacctataccccatgctggtgcagagaaaccggggaaagtctgcacgcgccacaactatcgcatgtcaaatggattaagcaagaattaagctcgacggacgaatgggccaatggaacggtcctttcgtcgctcgttatggactactgtcgacgaccattagcagcacggttttgcatataaatgcccaacgacgcccgcatggaatacttcttctatccagtcctgtccaccttgaacaacaatctgaatcatactcagagcctccattggcacatctcagcaatggcttctgaaaagcaagccaccgatcatgtcgagacatatacagatgtcaagccgggctacacagacctccaaaccagcaccgaagcccacgccgccatcgaaaaagaacacaaaatgaccgccatggaagccctgcgactctaccccaaagctgtagcctggtccctcctcctctcctgcgccatcatcatggaaggctacgacgtggtcctgatcggctcattcttcgccttcccagccttcagcctgaaatacggcgaactcatgtcggacggcaagtacggcctcgctgcctcctggcaagccagcctaaccaacgcgatgagctgcggccagatcgtaggcctctttgtgaacggcatcgtctccgagcgctacggctaccgcaaaaccctaatggcctgtctagccactaccgtcggcttcatcttcatcctcttcttcgcatcaaacgtccagactctcgtcgccggcgaactgctcatgggaatccccctcggcgtctaccagaccctgacagtcacatacgcatcagaggtatgccccgtcgcactacgcgcctacctaactacctacgtcaatctgtgctgggtattcgggcagcttatcgcttcaggcgtgctaaggggtcttgtcgcacacaccgaccagtgggcgtaccgcatccccttcgccatccagtgggtatggccggtgccaatcttcatcggggtgtacctggcgcccgagagtccatggtggcttgtgcggaaagacagacgcgaagacgccatcaagtccgtgaagcggctcacgcgcgcagaccccaatttcagcgcagaggaaactgtctcgatgattgtgtatacgaatgccatggagcagcacgccgagactggcgcctcgtatatcgactgctttaaggggactgacctacgacgcacagagatcgcgtgctgtgtgtgggcagtgcagagtctatgcggcagtggtctgatgggatactcgactgtcttctaccagcgtgctgggctggcggacgagcagtcgtttaccatgtcgctggcgcagtatgcgattggggttgttgggacgtttagctcgtggctatttatgacgtactttggtcggcgcacgctctatgtgggtggcctggctatcttggcggttatcctgtttgtgattgggtttgcgtctgttgcgccggcgactacgtcgctctcgtgggcgacggggtctatgctgcttgtgtatacgttcgtctatgattcgactatcgggccggtgtgtttctcgctggtttcggagatgccgtcgtccagacttcggacgaagacggttgtcctggcgaggaatgtgtataacgtgcttaatctggtgactgggattattattccttatatgctgaatgtggatgcgtggaattggagggggaagtctgggtttttctggggtgggctgtgcattctctgtcttgtttggtcgttcttcagacttcctgagcccaagggccgctcttatgctgagttggatgttctgtttgagaacaaggtgcgcacaagggagttcccgtctgcgaagacgggtttggtgcagagtgagctcgagggggcgaaaggctctgtttgaggctaatatctgagagaagtattggaagcatagtgacatgtagtatcgtcagtgaaatgaaatctcatcttgttgtaaccaactcctgagatctttgaacgccttggtagagaatattataactagaagcccatttacgaagacggtttctttcaaaacttctaattctgctaggaaatgctgttcgtacacaaaagaatatttgcaatcaaaaaaaaaaagacaagaagcagatgagtataatcattagaccaggtatacgccacctatgacattgaaacaaggaaacaattttttaagatcccagtcaaaaactgatatatcagttatccaccaagaacttcattctgatacccatagctgccaactcgacatccaagtagcgcagcacaccaggcacagcaacgatagtaacattgtcgccaccgacgtagcggtgtccatcaccatcttcccaaacctcagcacgggagtcgtcgaaggtagcctcacgggcacaacgacggcaacgcacaacaccattgacaccgccaacagcaccaatagcagagccagcatgagcattggtgttctgctggttaggagcagccttggcagccgcagccgcagcaccagggttgatagtagtgcgggaacgggacgagccggaaacagcaacctgtgtagacaagaaggacccacaagagcgacagatccaggtgtgctgggcgtcggagcagttcatgagacgatcctgcagcaagaaggccgcaccgtgagcaatgagcgaatcacgctccatctctccgacacggataccaccacccttcgcacgacccttcacgggctgacccgtgagcgcgttgacgggaccagtcgtacgcacttggaacttgtcgttcaccatgtgacgcagacgctggtagtagaccaggcccatgtaaatgtcggcggagaactcgcggccagtgacgccactgtacatcggctcgttgccgtagtagttgtaaccggctttgcggagctgctcaccgaagtagtcggttgcggtgttttcttcggagaattggaagggagttgagtcttgcggtagaccgtgcatagcaccggcttttccggccatggactcgatcatttgagcgattgtcatacctaggatatgttagatgggaataatttgatattatgagcgatgggagcttacgggatgggaaagcatgagggttgatgatcagatcgggctgcatgccgctctcggagaagggcatgtcgactgcaggccagagttgagacaacacacccttctgaccgtgacgagaggagaacttgtcaccaatgacaggcttgcggggaatgcggtacttgatactgagcgattgagcaggctcgttgccagactcggaaccgatgattcggagactctcgacgtagccttcctcggcatccttgtatttcatgtagtgggtgattccatcgacgttaacgtacgagtcggaggctggatcgaatcgcacactgtgccaggccgcgatcttgtcaccttccttgacgcgagcacccaggtgcggcatgccatcttcgtcgatgatgttgcgcacctgctctttgacctcgtcgccgggagcaaacccaaacagcttggtgacctcacgcttggacttattccgacgggagtcgttgtcggctaaagtgacgaccttggtcttatagactgtaccgtgaccgaagccacgttcgtgtgcggacttgttgataatcatagcgtcgtccatgtcgtatccggtgtaggagataatagccacaactgcgttcataccgttggggaagttgtccagaccgtaggcgttgtagagaggtggtcgcacaatgggcgtttgacccgtttggatgcggtacaacttgttgtcggtacggtgagcaatcgaggtacctggcgtacccatggtttgtttgctcatctggcactggtacatgttacgtggagattggttgtagtcggagaagggggtcatgttcgcgacaatagagaggatgttcgtgggcgtgaactcaatatgggtcgaaagaccgggaatcaggtcagactccacacaggcaatctccatgaaaggttgctcgaacggtccgacgtaatccagcttatccagcgccaaatacttaacagggcggtacattctcgctgattgggagaacatgtagacacctgggtattgtccaccgcttgagttgggaatatatccaatttccaattcacgagggatgttgtttttgccttcgaccttccagtaccggatggtatcagcgattctctgggcctgcttgggtgagcagtaaccaatgattcgtccatccaactggacaacaacgctctcgtccagagccacggaggactcagaccggacaccaagttgaaccagagtccgaggcagatcagatacatccaagttgtcagtagaaattagacacttgtgcgacaaatggttgagcagaccgcaaggcgatccatcaggagtgtggacagggcaaaggaaaccccaactttctggtagcagtttgcggacagtggtagtcttcaactgggcgaagaaactaccacggtgaatcatgcggaaatgactgatgaaacggtagaagttgatcttctctgcaatgacggtgtaacctgaagtttgttgcaaatcaagaccagtaggactgatcaagttaccggtggagaggaagtactcgagcgcattaccaatattctcatttgatctcttgacgatcttagagaggaagtcgcgctcaaatgcttcatcggtgaaccttgcgccgttgttgcggatggaccagtctctggcaatgggaccgaatgaacggagccactcttcgatacgttccttgagaatcattccgtaaaggaaaccaccaagcagaatttcctggttggagacggcatcgggattgtcgggagcacagtctcctgcaactgtagagtaaagcttgcggaccatgaaggtgatcaacttgaacttgtcccaatcttgcgcctcggtgacatgctcatttccaagatgagggagaacaaccttgcggaggaactctgtgccaacttcctcgtcgggcatgtcagcggggactccgagtacaggtcggaaagcttttcccaggtgagatcgacaatcgtactggctgtgcttctggtaggcgtggtaggttctcaacaaaagctcgacacggtccgtgacgaaagtgttgtccatgcccttggaagaagcaccaccgacaatggcctcgaagatttcgcgatcgttagtctcagcgagtgccttgagaatcatcatcacgggaataaggtattcattcttgcgccatgagaaacggaaggtgacgtttccgtcggagaggtagtgaagcacgtttgtctgcgacgtctgatcgggacggaccgatcgtatttgaacaccgaactttgtgtaagtctgcccacgcttgacaaaagaattacgaatgatggacatggggtagttgcgcttgccgacgaccagcatacgaatgagcttctcgttaccgttaacgatgtagaaaccaccgagttcctccgattcttccttgtgtcgaacaagctcctcgggactagcatgttcgaggtgacaccggttggtgcgcaccatgatcgggacattacccagctcgcggatagactccatccagtctccattgttgacctggtactcgaggcgagcgcggagcttgccacggtacgtcgagtggcgctctctgcattccgaggggtagatttcacggtttcgggtggtgtacttgttggtggggggcagggtaggcttgtcgaggaagatttcacgcacgcggacgttcaagcgattccgcttcggtgggcgaacgccttctgattggcgggccttcttctgctcataggtctcgagttcaccatcgaggaaagtcttggtaccgatatccttcaatcctgcctccaggatcttgctgtcttcgaagagagcattgaaggaatcgatatgcggtcgaatcgactcggccagcgatggataagccgtatgatccgcgggcggattcttgaacaggttatcccgtcgcaaggtgtcgtattcgactgaccactgagtgtctgtggctgcgggcgccatgatggaaattcgcagctcttaaaagtcggttgatgcggtatagaaaagaaagactaaacagcacaataaatgtgacccttatatgtcaagataaaagcgcgacaatatcggttctattcctccgcccaatattgtatcagccagaccacaggaattgaaccgacaatggcagctgccaaaagacgagagatgtctgttctgcttggggaaatttttcgagggtggagccagacgcttatcggcacgtggtgatatacattgttggcctgaggcgcccaaatgaggttcaagtccaaaagttcgacgttcaccgttcattaactccctaatgccgtactgaaactctagtttgactgcaagctcctggcatgattatgaagccctaatcccagtagactctagattgatcaaacttgcaccactaactgctagaaatgtgggaacttgtaactacgccacacgggctggctatgctgcacaacgccattcaccccaagctgaagccaatggagactaagcgccctgaggtcatgtgtgtaggtagatcggccacttctccatagacaaataggacgttgtgtagatccaatatccttttctattgacatctgccggcggttatccccttaaaacatcatttcctctaataataggccttttaaattgtgtcaggttgattttcttgcaacggtgtggcgatcttgttttctctctcttctttttttccctctttctctcacctttcatctcttcgtcatatcgagacatcaccaaggatatatcaacctgttgtgcagttacaaggtcgaccccactctctggcttttgtcatcctgagctttttccacacacacgaggcaacttcctcttaatttctctggcagctttcttttttttagttctattctactgtattgtctcgtttctcttccctcctttttttcattcctttttcataaagtttcgcctctcttcgtcatggccggtatatttcgtgctatctatgactggcttctgaggatgttctggtaagtgggccgtttgatatatgcagtgttcgggtgaccacggcccgtccccgcagatgaagccctgctaaaactccatacagggccagcgagatggatgtcaccatgatcggccttcagaatgccggcaagtcttctctgctgcgtgtgttggcggtaagtcgatctgataaagtcctgacggggtgttgctgaccataacagggtggagagttcaccatcgagtaagttatagatggtctcacatctgagatcatttcatctcggccatgtcctgatcgtcttccttgtagctccatcccaacaatcgggttcaacaccaaaagagtgcagaaaggccatgtgaccttgaaatggtatgttcatccttcccgattaagcccggcggcgctaatatatccctcgcagctgggatctgggtgggcaacctcgatttcggccgatgtgggaacggtattgtcggggcgtcaacgcgatcgtgtaagacttcctgctttccccgtcccatctcttcccggcatactaaccaaggtgaataaaggtatatcgtggatgcagcagaccgcgctgcactcccagtagcgacagaagaacttcacgacctgatgaaaaagcccacgctggatagcatcccactcctggtcctcggaaacaagtccgatcttccagacaagctgtctgtggatgagatcatcgaggcgatggatctgaaatccatcacccatcgcgaagtaagctgctacggtatcagcgccaaggaagaaaccaaccttgacgctgtcctgcattggcttattgctcgagctagccggtgaggatactgtcgcttgtgcctgcccgctttgaccttcaaccttcaacctcgactcgcgatatcccttttgtttttcatacccttaactgtgccgcattttgattgtgttcatatcccgtagactccagcgtgtttggcccgcagcctcggatgtaacgatgttgacgatgtagtcttcttttttctgctcatggattctcgagttcatgattatgatgtatgtatgttaatggtgatgtgcgcttgtttgagccttcttttttcgtatcgttttttccttggtcgctttcttcgatcgataagtattagggtgttttggcaatactcatgggggaaaaattgacagaaagtcgatctggggatggccgacataaataaacaggggccaccccggcattgatgcgttggctgccaacgcatcgatgcagacgaataaacctccccgccaatggacgtctcacattaaacacatattgattagctgagagctggaataataattcattgtaaatcgttcggatatcattactggccactataccatacatctcttttcgtactagtgtgcaccttcatgtcttggatattattctcagacaaatcaaatcaagtggcattagtcgtacacaaaatatctagatcagttttgtaggtccttccttgcagacaggccagatccggagttgctcaaaaccccctttgaagcgcccaagatagcgcagtaacgcccgtaaacatcaataaacgaaaaacctcacgagtgaaatgcgaagaagatatggaatcatttgcaacgcttctccacaatgttcggcccatgctcctcgtactccttcttggagatccacatctggtggaaagttcccaaactagccaggatacttcctccaatccaggagccgaagcgtcgctcagaggtattaccgggagcagtaacacgcaccctggggccagggaacatttgcatcagctcgtggtttagacgatcagtgaagccataaagcaagctggatccaccggttacaacgacattcgccagcaggtggggacggaggtcgacgtcaacgccggccaaagaagccttgacaagttctgggatagtctgggcgggtgtcgggggagggaaagccgagtcggggtctggaatagcagctttggcgtcgaacagagattccactgcgcggaaacggtcaacaccgaagacttggttgtatccatcagggaactcgaatggacgaccaggggtagtgcgagccatgtcttcgttagatacgcccgtagggctgggggctgagagcctcgtaggtcctggccaaacttggacgacacattccttgaactcggacagtgtacgctcctcaagcagagcacggtacgacgcatcgggtgccttgtctgcggggaaggtcttgtatttcacttggggcggttgaccggcttcgacggccgatttcgagctgataaggtaatgcggcgtgattgtgatgggctgtggggagttggccttgaaaattgccttgatctgcgacgagatgtaatcaccgcccaacggcgagtgctgcacaccccgtttcaggatcatgccatcgtggatcggggtaacagagatgttagaagcgccaatgtcaataacaagggcggaggccttgccggaagcgaaactgcgcatggaattgggtcagcaagtggtacacatatcatagttaatgggtggtatacgtacgcagcaagaacaccagtacgcgcgagatagaaggccggtgtatcccatttttccattgcgatttcaatggtcttttcgcgtgccttcgccgggttccatccaggctcggtcatcaacaatgggctgtccgacaaaggcttctcttctgactccacctccatctccgtagggagctcgtctgcagaaacgtcgtttaatccgttctggaaggggttgcccgctctcgttccggtgagtcgcgaaataaatgagtgctcccacactttctctgccatatcccaatcttcgacgattccatccttgccaattgggttgtagatggacagaccgggtcgtggggtaacgaatatgtcgtcgccaaagacgagcttctcttggccgtcggcgttgtattttccataataggttggaatcagtgacttgggagcatcttcaccggcaaagcccgcgcgagtggttgaataccccgggtctaggacaattgctgacacctcgtctatagtcgcgcgataattagcatctcgtacggtgaataggatggaagcgttctgtggaatcgcagcggcaggcgcaattgggatgggatatctgggatcacatacctccaccatactcggcagcttgaggtgggttggaagggttcatcgcgaaagttgtgcaggtatatctagaggataagggtcgcagctgtcacaaggatcaacgtgaatattttggtttaggtcgcctgaagaaagtcaagacgtgaccatgtgtatcgcgcagacaactagaggggctggttggaggcaggagaagggcgggtctttttgctgcgggtggtgtagctttggctttggcatccaaacgggcagttcaagatcaggcttagtcattccaggtgagcagctgtgctgactaatcagggccacaggtaactacctaaacagagggctttaggacattatgcatggcccttcttgagtcacatcctttttatggttaaatattgaaagtgcacatagtatttctttgaagacagtgtcttatacgagaaaatagagataaactgatgaggcggtgtacataatccgaaatgaagcaaaaagcatctataccgaagaacctaacgaacaagatatcattctatttccctccttttgcttgtgtttgtttctcgcatctcggtgtccttatatgttacttcgatgataggccagaaatagcattagcccgggattattacggtatcatacatgtcgagtaaaaacacacgccgcagagggccaagtgcataaaagtacatatcaaagaaaatcagccgtttcagatgagaataacaatcatttctttcccgcctgtgcttctttctctcgcattgcagctcttgcgctgcgactgcctccaagcttcggaccccgaggcgcttcaacattggccacgggttttgctgcaggccgagtccgacgccgagactgcatcgcatccataaagtcgcgcctgaattgctcagcaactcggtcatcagcagcttgttggtcatcaagctgtgtttcctcttcttgttcatcatagatttccactataacagctagtgttagcaaagataaagatcctgtaaaattcactttggaatgccacgtacatttgctctcacgtagtacctcctccacaagacgatcccttgcgatgtctgcatctgtcctctgtttgcgattgcgccatgacttgccgtctgggccagggcgacccgtctctgaagcagtatcaaccgatgccggcaatcctccattctcagtcatttgtcgagtcgcagcttctgttcgcgcaatgtttcgcaatgtggcttcttggccgaggtcgatttcatggagtttgcctagcgacgcaggttcgcgtgtctggtgtccaggtagcgacaatcccccggcaacttcctcctgggttggttggttggaacctgaatgatctgcctttgattcaggctggtagcgcttagccatctcggaatctatgaatgccatccttatctcgttagtccacaccaaacgattcggacgatcagccgcgggaaagaatccgtacatgtgcttgtcaacatccactgtctgaccagtatatcccgtgaaacgttcattcattgcttgtattttctcgttttcggtatctccagccgctggtactagcgctagttgctggccctgatcatctcctagccgtgacgcggtagaaaacccaatgccaccctttcgaattgcgcgtggacgccgaagattattgctccccagagcttgtgacgcgccaggattatcattttgattatcggcctcttcggtgtctaggatctcatggtcgggacgtcgtcgcatgaacttgcgcttttttgctgggcgaaacagggattcaattggcagaatatcttcctgcgtgtccattgtgatttgcgacaatgtaaacttgggtggtaggggaaacgagcgggaaattgattgtcaaaggtgaggtcattgagcaggcaaactacaattcgccgattattgaccgccttctattctgccaaatttaggttcaaactctaatgtgacttggacctatacaacatacaccagatgtgatgatagccaataatctgccctttccatgactactaccgtgatagaaatggaatatccaatcacattgatcgtaaactttatttttctcaaggacgttgatattagaatacattattttgctttgatcagttccgattcatatatcttttcactgattcataatatagcaagggaaaaaccgtctaaatttcacaatgtatagccattcaaacaatccatcttacctggtcacgggcctggatgtcatcgttttgcggttagagcctctcaaggctatatcttggaaagaggtcgccaccaaccttggaagattctctgtgtttataaaatccacttcaattaactagccagagccagtatctcaaatcgaattaaccgaatagccatggtattacccagtctaactaatagtatacctgctcccaatttattacaacatacttcatatgtatttgccttggacagaacgaagactctcatcaggaggcggctgggataataataacttggctttttaacaagcaatttggacatactaccccatatttctttcatagaagagccgggagcttgtaacgggtgatattgttttaggttaaccacagatgatttgagacacgtaagtaatcatcgaaatgaaatgaatctcgggaagtcgaatctcaaaatgccgtgctccatagttaaacgtcatctaccactaatactactactactagttagtgtacctgatttctatatgatttttgcacacccctaattcctcaccgcactcaccgcacacctatttaaactactgcggataaggcgctccttagccagcatttttcgccgaatctgtaatttaatagttaattttagaaagctgttcataccatttctaagcaaaatgcatttctttttactacgtatgtgaactaggagtgggcagaatacggtagaaaactctaccggcatatgtcgcacccgatcaggaaggcgatgactgaattttcaggcaagggggtggccataccccggataatatatatcctagcagctgcttctgtactattgttcagccaatatcagggctctaaaggtgagatctcgtaagagacagttccctagttatagaaacgacaatagtgatatcatcttgtttatatcacgggtgtgtcacggactattttctaacattaatgtctcagattgctcgtttatctctttccagtaagaattaggtggcaaatccatgttctgttcagatcctttgtatattctgttattcaatcctaatcctacccgagtgaagaatctagtcacatcattacatgtaggctcagatcaggaggggatcggcaagggttcacaaaagatgtggctgataggatgaatgcgaagataagcaaggccgtgagataatctaactattgtaagtcacgatccgtgcgtctggtacagagtacagagtaaaccctaagattctcacgggagagagcttgctagttcctcgaaaagacctccgcacgacccaaaaaacccagatgaacctagtctgggctgggtttcgggtcgtgtggaagtctagctgagtaataatatgttgaagaaaagaagaaagaaggttgcttggcaatcctcagaatttccgagttcgggagttctcaggcggaaatcgtattccgtgatataagttcttgtccaatctagatactgcatgataatacatccatcgtatcaggaacatgaccccgggtaggtcggatgctttctggcctaatcaaggattggatttgatgaatgctgcaaataatcaaagtgtgcagcacaccgctggagagaaagccgagaatacccctaggttagggtggctggtttgttgaggcacgaagctatccgttgcacggagtacggagtagatgctagcatgttctttaggaaaacggctgacagacgtttgctcaattcgcccatttggctattggccaggctttctacctcggtcatgaacatctactccgtattagaccccgcaaataatgttgaaatctctgactgtttgtgacccgaatccgtccacggtgtggagggatcccccatcttgccccggtcttgagctcaacaatattcctcggacatctctcgggaaaaatgtatccaccagagaataatgcaattgttatacggagtacaacatacatcgcaagggatatcgtggcttgcctgactagatcgagacttttattttatttttggcaaagtttcaacgcctcaatgacacaatctcgcacgatctggagggaaccttggaagaaacagtcatcaaaacagagcattttaatttgtaaagctttgtgatgtggaacaatgtactccccgacaaatccttcgattttaattaggcgtgcctgtactccacgggcaaatccggagagtgaccgagatggtggggtgcatgagaatggaaaaaccccagcctggaggtgagattcaaggtcgaggttatgaagtcttggcacttggcacttggccggagtggataagccttcgggactagcccaagcctttcaatgccgaggccggcggtccgagtcaggcaatgagctaccaacacgcgagaccgaaaagacccgggatattttatgatggcatttctcggaaaataaattactccaaacagcttcatccctacttccccattccatgtggcataattcgagcgagaaatcatggggaggatcggcaccccgtctgggctccgatattcggcatttcctccaatcagtccgggcgagcaagccagatcatcccgccacttaactcttattttcggccccaagcctcgtggatctagtccggaagcggtttcttcttcgggagtgacgaagctgcgggatccttttacaccgggaccgggaccacatctaccccgtggagtcggcgatgtgaccgagtcacaggacagaaccggtcacggattttattgaaatttgcccaaaacttgccacggtggatatggatatgctatccactgtggaattcccccatcccacaggtacaggatttcatttttctgatgcggggtctccacgagaagggttgaccgaaaacagggtataaacccatggagagaccggcctccattttctctctgtttctctcatccctcagagtggcctttcacatacacactctaacatggtcgcattattccgaggaaaagcgctgagcgtagcgcaggcgttgctcattgtagcaccggccttcatcgtcttcggttacaaccagtctggcttgggccctcttgctacgttgcagagctgggtcgaagttttccccaaaatcgacacaatcaacacatcggacgcccaacgcgcgcaaaactccacaggcaagggtgccgtcatcggatccttccagctcggtgctctattcggagccttgtcgtgtacattcctaggtgaccgcctcggtcgccgcaagaccatcttcttgggtggtctccttactatcatcggccaagtgttgcagactgcggcttatggcttgccacaattcgtcattggccgtatcatccttggtctcggtgtcggtcagatgagtgttgccgttcccgtgtggcagtccgagtgcacgtcagccaaacatcgtggacagcacgttgtcgtcgacggtatctgtatctgcttgggttatgttctttgtaactggattgattttggcttgagcaaaattaccggcgcattgcagtggcgtattccattggccgtttccatcttcttctccgtcgtggtcgtgttttcgatcttcttgctccctgagtcacctcgatggctcgtgcgggttggccgcatcgatgaggctaccagcagtctagctgcctacaagggtctgcctgacgatgatgaggctgtccacatggaaatcgccggcatcgaagcttctcttgagagtacggttaacagcgcctccatcatggagatcttcacatccagcaaagccgacgatgagcgccttatctaccggttctgtctgtgcgttgcactgcaattcttccagcagatgtgcggtggtaacttaatctcgacatacgtgtcgacaatcttcgaagagaacctcaacatgtccagcgacctggctcgcatcctgtcttcatgtgccatgacctggaagttcatctgcagcttcatctccttcttcgccatcgaccgactcggccgtcgaaagatcttcattatcagcggtactggtatgtccgtctgcatgacggtcctcaccatcaccaacagcttccaggacaacaaaaccgcatcgattatttcggccgtctttatcttcctttttcaactcgttctaccctgtcggtttccttggcggcaacttcctttactgtaccgaagtcgctcctatgcgtctccgtgtcgccatgtccgccatctcgaccggaaaccactggctgtggaacttcgtcgttgtcatggtcactcccgttgcacttgacaccatcggatacaagtactacattatctacgctgtcatctctgcctgcattccagtctcggtttacttcttctaccccgagacaatgaaccgcaacctggagcccctgaaccatgtcttccgcgatgctccgaccgcgtgggatattgtctccatggctcgtcacctgcctcaaggtgaggctgctgaggtggatgtgtggaaggggaccgacgaaaaggccgagatgaatgaaattgagcagaaggagaatgcttgaattataaattaaatttgtcgagaccttaccaactgtatatactatgtctgacgatgatgatgatagaatgagttgtactaaagtacaatttaaataaatgtgatcattagattgagcacatcaagaatttcatgattccatatttcattcatttcccttggatctcctataagcaccgtaagtaaatacaatccggtctctgaagtactattgctcctaagaacttggcgtagtcaagtctcatatcatcccaaattgggagattaaacatagttgcctctttcactatgagacatgatatacatagaggttatgcatctcaattcaacataatgaattgtttaagtttatgtgaaaggtggtattgataacccttttaagaacttcaagtcaagttctttgtctcttactctatctataaattgacatactatgttattttcattgatatattctcgttcccattgtttagccaaggttatccgctctacttcgagtttctttgtctttcaaggctacgtttacatccctcgagtcttcaaggtgttgttgattgttcatcctttgttttttattctttaggccgatttctggtgaattggtgtttgatcacgacaaaccttgtaactaacattaaacccaacaaagagcattcaaatatccagtatcagctatataatccccctctgtatgtctcctggtcttcatttcaagctcattatccaacaacagcaccaaaactccatatatctgacttcaattgtttgagttataccaatttctaaaatcaccaccaaaatgctcaagaaaatacggcactcgcttagatgctttccaagacaccggtgtgactgtgacgatgacagtcaatgctcgggagaccaatctaatcacccacgggcaagggtaccggagcgcgccctgcgtcaaccacttcctaagaatgctgccaaaagtgcggctccagctaaccagcctgaagccaacagtgaaggtgaagacggaagcgaatacgaggatagcagcgatgattatgatccccaagctcccccgcccagcaacgttcccctgtccaccaagggttcgcacacaggcgtaacacctgcgatgagtgagacaaaccttgatgagtcttcgtctagcaatgacccatattccctctcaaccagaaattcctacgcaaacagcccggagctaagtgatactggttccaacaaagcttcatctggcgacgagttttattccgtcggaacaaagaattcgcacacaggtattagtcccgagatgagtgattccagcctcagtgaatctcaatatgaatcattcccagattcagaagaaagctcttctctcctgagtgcgtctggtataggtgaatacaatatcgatggagatgactataatggagctgacgacgaaagcctcgacctggatcaggatgacgaaatcctagatctggatgaagtaatgtatgatgcggaatattccagcggatggtcgagcacttctagcgacaggagacgccggcgttctctagatagtcaagctcaagccgatgctgaacacagaggcctttatggatccagaggcagtagcggcagcagcaaacgccagcgtcttgatgactcattcgacactgcaagtgggagagtgagaaccggcatcgaactgaccgtggaggacgtcaccaggtacagaaataaaggagcccaataccaagcatggattgacgacccagaagagccagggtgccaaatccaaccggcaacattaactatagaggagatgattgataaaaaacaacaggtgccttggaaagtccatgaatcttatttcatagccgagcctatggcactacaaggcggcgatgtcgagtcgatgaatattgatcgaggcggtccgcgataccgctacacacacctccgacaggatccggggccaaacacactcgaagctaacgaattcgaacatcgggttactcggggtattattattgccgagagactctatagggaagacggtcctcattggaatgaggtcgctcgagctcaatacttgcttgattttaatttgaatactctgaggcatgttgtctttactgatatcgggaacgaagaaacaggtccatatatacgacacgaactataccctagattgggtgttaggtggtcacaggcaagagacgttgagtgtatgaagtttgagcatggtagtgctgagtatcaagaactcctcgggacaaagttgggtaaagctatggcttgtcttatcctttcttcattccctaggggtacgatgaagatcactcgtattgccacttggtgtaattcgactgcgccgcagatgcggttcgagattgaacctgttattgctgcatgagatatatgcatatatttgtgctgatatttgattatttagattgttgttagagtcagaaattgagattttactaaggcccctgctgtaatagacaagataggcattagttgggtcattcatacaattgggatgacttccaagctgaacaataacctgaatttgatcttgaataccgtcctgtaccatacataagctaactcattgctttgaaaagaaaaaaagaaaaagaaaaagatatacaattaataatagtcatgccttgcacagaagttcgagtccgatattttaggaactcgtgagagatgctcaagcgaagaacttatacaagaatgaagacaatcactgtcacaaatagcaaaaaagaaaaaaagaaaaattgaatacatgagaattggaaacaatataccagcaccagtatcatacggcatccgcaatgataacctcggcagccttctcactgatcatataaatgggtagggcgatatagtaccctggaatcttaggaaagaccgaagcatccacaacacgcaagccgtcaaccccacgaacacggaagtccgcatccaacacagcctgaggatctccatcttctccaattgcagcagtacagcaggcatggtgaccccatgcctctttcttaatgaagtctttcatctcattctcagtagtgacattgggtcccggccagacctcttcaaacccgccatcgaggggaataaggtcatcgaatattgtgcgggagaactgcattgcttcatatacagcctgcaggtccttgtcatctgcaccatctgtggtcactccggtatcgaacgagtggaagttgataaggggcatgtcacgcgggtcggtagagcgcaactcaactgtaccagcgttgttacgagagcgcgactttaacgtaatccaggtccagtgctgggcatctttgagaccctcgtaggagtagttgggataatagccggggaagttggcgggtgctcctgagatcagtaggtcgggctcatcctctgcgacagacgacttgcgaatgatggcgatggcgattccattggtggtatatgtacctttgaacaagggatcattttcatactgttccaaacaggggtcgggaagtgaatacaaaaaggtacacttggatgtgaggacgaaatcggtgggcgacttgcccactgtgcccgtttcgtaccgatcttgaagattacgaccgacgccggggagatccaccagggttgagattccaaatttggacaactcctcctttgggccaataccactcagcttcagcagctgaggagtattaaaagaccctgcggacaggatcacttcacgagcagcactaacgctacccggtgtcccattagaagatgtctgggaagcccgggggtctgcacggtagaggctctgtccccgaagatagtcaacaccggtagcccgtggcttcgctccagtggtatcgaaccggagcttggttaccagggtgttcagctggatatcaaggtgatactttcgcgaaccatccgaatttacagcattgactgtcttcatgaggaattctcgaggacctgtccgcttatactcgggaacatctacggcgagagggacttggtatggaccctcctcgtagtcacgcgaaggaagggggttgttaagatcacgcagcagaactccggcgaggcccgtgaccgtagtgatcagtttgcccagcagtgtttgacccgcggcggtcgcaccggccaggatcaaggacagaagcttttggtcttcaatgacaagacgcaggtctgtgaggctcgttgtaagccatccgtcgaatccgtggcctatgatgctgctgggaaggtatcggttgcgctctagtctctcgaagtattgtcgcatattcgaggcagaccatgaatcattgccagtgagactggccagttgctcccagtcattctcgtacgggtagatggtgctataaagatactggtcagtatatgatagatacatccgatagacatgcggagaagatatggctcacaccatggcattatgagcagagcatccacccaaagtacccgctcgagggtataaaattcccaaaggttcagacccattgggcgcattgcttccaacatggaggtgaccagcaggtgtccggtaagtcattttgctgtcttcttcctgacgagtcaagttcgagtagtgattcacgaaataatcccatctcattggctcgtattcggtggactggagctgcagagcggggacaatttgctgagtcgcatttccctggtcatctcctgcttctagaagaaggaccttgtagcctgcaatggccaatcgtgccgctacagggccacctccggcgccagagccaacaacaacataatcatattccgtggtggagttagccgaagaccgcctgtgtgcatcatgatatcgatgattcggtctatgatcactatattatgttagttttccgtgtcaacaaggtctgggtagagaccgaaggtgcacctacatagctgaggcaattaaaagagtggaaaatagcccaacaaccgcagaaaaacgcatagtgaaagaaaagggcgaagatttaccccaaaaatagcaaaagaagagaaataaaaatggggtcttcagccagaaagaaaagaaagaaacgaggaacttgggttatatcaatggtcacaaagctcctctcctgactctattacaagggcatagaagcaaaagcaccgcggacgcccatagtactatattcggccagctactgggtatattccttcattgtccttgcaaaggcgatcgacataagcttccaccttccaaattagcctgtatcaggcatggatactcaccgcaatacacactaatcctatgatccttgtacgtagggatggctctgactcgtaccaactagctccgaacgcagccgggtcttggcgagacattgatactttggcttgtgggaccggccagccaatcaacttattctagatcctgcgcactcgtgctagcctcttagtgtcttctctgtgccgtttgacatgccgatcatacagctctctgaaaagccaccaatctaacggtgaagctagtcttctttgggttccaggttctttgttcgttataatgatacagttactgttttaggagcgtatggaatacatctcagacatccgaaacctaaagccccctattgttgtgtatgactggggatgtagcgattcttcctatctttctgtctgattttatgtaaggtacacttggaggaaaagaaaatatgatatgatcttatgaataatttgagctttatcatacgtttattgagtatgctgaataaaaatctaaaatattatattaaagagggatatggtcgttttggtaggatccaacaaccaaataaccgcgaataagtaaacacagagaaagaaacgaaagaaatagaagccattgccctacataagaagataccctatcttcaccctcaactacactggttgtggatggtgcagccgggcttcatcagaaaggtccaagtcatcaaaccggtagaatgggccatcactactcttgttctggacagggacagaagtcccacgagaacgcgagttcatagcgtatgatgatgatttggcttgctcagtatctccaaagaatcggggagatatacgacgtagtagagatcgaatagcgggcagacacgcacatataacgccaacgtcgcattcaatagtactccaataccctatagccacataatccccttcgaaatgtcaatgaagctgcaaatatagaaagagaaaagagagggaatgaacactcacatgtaaggttagtggtagaggcaaagtgaatgagtgaatttagccgcaggatgctgacaagggtgacactaagctcatgagttagtcattgaaattttggaacaggctgaatagggaaacgcacaatatgcccaggctgaacatgcaaattacgaatgatttccgtttcatggaaaggttcagaccgtatagctgtcgtagagggagtgccatgacaattatatcgagaaccatgttaagcactgccgatgaccagccctgtgcgttgatgtggttgcatttgtagttctcctctccataccagcgatgccacgctccgggtagaggccgacactggaataccgatatcaagacaaaggcgatccaataggagacgtttagtgcaatcaccacgtacgttgctgtccgaaacctccgatcggggaaaatacgaagatagaaaaaacaaattgatattttggtcagcgggagaatgctcagatacaacaattcatcccaaaagtagacctggcgcaattagacaacgtaccttgggaagagcaggaaacaagaactttagggtactcacataaagaatatgagtgatattgtcgataggaagggtccacatatccttccccaaacctgtgttggccactatacaaatggttagtggagtgaaggggctttgactagctgccaaggaaaccatacagacgaccgagagtgctgaaagtggtatgagaaaggcctgtcaatttcagtgagaagagaattcggtttcgagcaaagggaaaggtggtatataccattgtcaacaccattgtccaatcatccgctccaaaaatgccaccacagcatctaaatcgagccacatccggagaataaaagcgcaaagggctataattccgcctgcaacccctgcataagatacagtctttgtgcgatcccgaatcgggtccccgcacgctgatgtcgtgacattttttgtagcttgtgtatattagcaggggatggaataactagtcataaaaccattgactcacttagagattctcgaattgtgcaattggcaagaacacactcctgcagaacggccgtgtaatgtacatcattgcacaggcatgcctggtcggttgtcttgcaggaagattgcgacaccgaagtcatcatacaatccagctaagaagggtcagtgatatcgagttcgcgctaaataacggcagaagaattgcacgacctaccgcacacgagggtaaaacggccgccaactgttccattcctgctatcacagtcgttgcgaacaaggcggccacaaggactgctgttttgaaaaaacgcatcgtgaagcttacaggataggattcattcgttttgcgattaagagactgtcaaaggagacctgcgctgaatttgatcagtcgagtcaggagaatctacggagtaatattatgagattcacgacgatctcttagctgggatacaagaatttgttctaccttcctgtcaggatcgctagcgcatgaaaatctcaagtttaaatgccgcatcagtcctcactggggatttgcctttctacatgtttagatgtttaggtaccacatctgtcattgacgttatttggggactgtttcaagcccctgccagttatcacattgtcacctagcaacaatccacaacttcaggagttcctgaaccacatcacaaaagtacaagtaattctatacagacggagtacgaagtacaaccggcaacttcggacccttagggccagtcaagaagttgactaagctggtctctcataactaattgactaaatggttatggatgatggctgatttaaattaagatcggcacatatacgagccttccccagctcttgggccaactctagacgtttggaggggcccactaatgccggaattgatggtccgtccagagaccgccgatctaaattgggactttgacactccccactcactcggagtaggttatccatttctatgccgtatacctagttgagcctagtgttctccagagagatccacaggctccggaataatggctaaattttgctcagactcccgtggagatgatccgaagaatctccgtagtgggtctatactatcgggagaaagagcgcttcgatatttacgatctacacgcatcaatgatccttagacatatcttacaaccccaatgccgcgatcagcactatcgttgaacaaagatgtttcaccctggaggcgtctgctaagatttaaattcaccgcgaggcgtgcgccaagatccatatatccaccacaggagcgttcgaatattcccaaattaggcccgatcgacaataacacacgaatagtacggagtatatgtatccataatccaccctgtgtagtcgaagggatggtcatggaaaaatcaggggcttgtgtcgtacttttcgtggctttttactccgtgcaggggtgctgaaagggatctaccagaacagaatccttcaatagagaaagagccggaggattgaaactgattgccggttaatttacgatatacacaatatattatttgcaataccactaccatacgcctggacagttgtctctatgttgtactccttcgggccataattgcatatattctatagtggactcatacgctaagacgggccattcaggggatcatcatttctcagcatgtgcgatcttcgaatatttacctaggcatagaattgacgcgggatatctaaggaatgcattattccactcctctggacagtcttcttcagtcactcgttgcacgatcattcctttgaacctaaggggaaactggcatttctagtggaggactaacacattagttcatcatgcgcattctcagtacaaggttgtttctttgccaattgtcactccttacactagtgttggctttcccagagtcgatgagcgaccacaatggtcattcaggacatcaaggcatgcacaagtcttgcccatatgccaacgccaaggaccaggccgagctgaagacggaacatgagaaacggtttctcttcagtttgatgaaatcgcctattgatagtatgccaccaaagccctctcgcttgtcacaatttgtaacaaaacaatagttaccggagaacatgcgttccaacccccagatttcgagaatggtgaccagcgaggcccctgtccaggtctcaatgcactagcaaatcatggatatatcccacggagcggagtggtgtcggtaggttattcctatatgactatcatcaactcctagctaaatccagaaaaagttcataaatgtgattgcagcaatcaacaaaggtatgattgcatcatgaaattctcaacacagcatattctaacctttcttcatcagtgtatggcatgggtgtcgatttggccaccgtccttgcgatcatgggcaccgtctggactggagacgtgctgtccctcgatcccagcttctccatcgggggtcccgatactggcgttaacaaccttctcaacaacttgggaggcatcctgggttagagcaccttacttgcttgctcatatctatcaccgctgacatcacctgcaggggagccacaaggcctcattggctcgcacaattttatcgaagcagactcctccaacacgcgtgacgatctctacgttacgggcaacagctggacactgaacatggacaagttcatgacttggtataatatgtcttccgacggcacttatgatatgaatctcatggctgaacgcgcaaagatccgtatggatcagaccatccatacaaacccggatttctactacggacccgtgactgggctcattgcgcgcaacgccggttacatttttgcaggtcgactgttccgaaaccactcgagtgaaaacccagagggaacactgagtaagctgatataagaggactgattatgcgagatctactaactccatcctagctaagagccaccttcgaaatttctacggcatctatggcccggaacacaatttaacctaccgcgaaggatgggaaagaattccggaaaattggtacaagactcctatagactatggactagtctcactcaacgtggatgtcattggcttcatattgaagtatccggagcttggaaggtaagacactctgccaggttcctcatattgataatcttctaacaataatttgaatacagcattggtggaaatctgggtgaagtagacagctttgccggagttgatctcggggatttgacaggtggtgtattgaacctagctagcctgctgaagggtaacaacttactgtgcttcgtggctgaggtgctgaagttcgccagccccaacgctcttagtggcatatactccaccgtagctaagccgttggagtttgtcactaatatcctcgctgtgcctttgctcaaccttacttgtccagcattccaagatcttcagctgggagggaagccgctatgggaggcgctccaagatgactttcccggtgctttaaagagcaaccgttcgctttaggtattgcgggcttgctttggattggatgtattataagtttttattccagtttaatactttattaataaaattctaattgttcctgtgaaaacctgaaaatgggtatatatagttacggggtgctgttctaagacagggatcaacacatgcattaaggggaatatacggggattgagaattcggaaacatgcaaggttatgcaggtcaccatcaaatgccaacctgcatattatatagttctgtttgcattttgctgcatatagttcgggcttacagctgatcgaatgttagaatgggaccgctaatttagtgtgaaggaaaatatattaatccgtgttaatccgcgtttcgaccatctatctgctcagaggggtcttagcgaatgtcgagatctctctttatactaggatgtcttcatagcttataatagacgttcataaagaccccatgatcattatttacagtattatctttaccactaaatcctatcttcttctgtactagggtattataacccctaaaagaatcccgacattcgctgatgtctgacattcgccgagctctcggaattcggattaatacatgttcctctgggccaagaggcgctaaaaattagcggtcccattctaacattcgaccagctgtcggtcgcaagggactgatatctgacattcgccgagctctcggaattcggattaatacatgttcctctgggccaagaggcgctaaaaattagcggtcccattctaacattcgaccagctgtcggtcgtatagttctgtagcgctcttgttttgcgttgtctgaattagtaaaacggcgcaatgcgtgatgataacagaattgtcagcttatcagcaatgcggctcagtggtttagtgggataattcatctttcgggagaaatctctggtttcaaaattacctaatatagatgaggtcccgggttcgattcccggctgagcccctttttttattttattttagaattccataccccttgaaccatacatttctgagggttaaagttattgatacccatgcatattcaaggagagcccaccaaccttagaagaccatgcataccacttacataacgtgtattttaaggttctggggtcgcgtagggcggaagccaattcgatatcccaactgcactggcctcggcatctctttccctgtaacagcattgcaaggaattttggcttcttcgattgagttcccttgagattctggaaactctctctgatcagacccctcagaatcaaacaaagaactctcatctgctaggcccgattaaactgaactagcgcatcgtgtgctagatctagttaggcggtccggccaacgacagaccaacgacaaaccgagctcatgcaactaagcgatagtttagagccatcgtacgtgtccctggacgaaagtgaaagtcccgactgagcggtgagaatcatctactcatgaatggtcggggatgatgaatgacagggattgtttagtgtcggggcagtgtacaaaatacggactaatatgcggagcttgttgcgccctgcgcttcgcttgcgatattggggctgtctctcttcatctgtccgcatgggattctgcctatagatatgagtttaattaacttgagtttgaccatgccagattagttcctcgaaagtacgggggccagagtgtaacccaagacattcctggaccttaaatgggatatcagtaatgcccattctttcaattggaagtttaagattagacatatatatatgatgcatttccctgatgtttggatctgccctatgcatactattcagtcaacttgttgatttctcttcatcatgcgctcgctgtggacattatcggcactggctttctcagctaaagccatacaaacaacaggatgtcctattttgggaccggcattccctgcccctaccgctctttcagaggatcctactttccttagcaaagctgaggaattgacctcaaagctcaatgatgccattaaaaatggaagtctgcccgccatatccttctcagtgcaggtctttagcagcgaagaggacgacgcgccattcgatttctaccacacagatgatccagttaaagttggatctgtgggcgttcaagaggtcgacgaggataccatgttccgcattggcagcatatcaaagctatggactatgtttctctttatgaccttggaaggaacacgatacttccacgagcccgtttcgaaatacgttcctgagctgcgaacgaactacagcgcagcacaggcaaaggatacaattaattatttgcaatggagcgatgtgacgatcggcgagctggctagtcaccaagcgggccttgcaagagactgtatgatcataacccggcgacgcgagtgtgcactgtgaaaaagaaactcacctttgattttagattcatttggagacctcgaatttgagtcagatcttctgcagggcatgggcttccctgcgcttccaaaaaatgatcaactgacttgtgggagcacgtctacgtgtgataggaagggtaagtcaattgtgtgcactcataatatggtcgaattgtttggctgacagcgggaatgttttcaagaattcttccgtggcattctacaaacgcgtgagtaggcatgatgccgctgaacttggacatacccctaacatggtctattagatcccttgactgcaacatcacacacgccgatatactcaaacgcaggatatcaaattctaggctacgtgttggagtcaatcgcaaaagccgactttgaagatatattactggaccgtcttatcaagccactcaacttgactcggtcttgtcttcaaatcccagaccccagcttggcagtgattccctacaatgagactttcagttggtttgggtatcagattggcgaagaagctccgtgagtgctaatcagccatttgaagtatacatagcttacacattgctagtgccggaggcatgttctcttccgcaaaggatatggctacatttggccgtgccattctttccaacacccttgttgaccctgccgtgacaagaaggtggctgaggccgatggctcacacatcatccctgcaactgtccgtgggcgccccctgggaaatctatacatttttgacacctcgtcgagtcgacctgtataccaaggctggggacatcggactgtactccagttcgatcggtctttcaccggatcacaatgccggtttcacggttctagtcgccggagctaactctcacgcgatgatagcgcaaatcggagagatggttgccgatattatgcttcccgcgctcgatgaagtcgctagaaaccaagcctttgaacgctttggcggtacatatgccttgacgagcgactcctccaattcctcaatcaccatcacggctgatgacgggccgggtttggtggtctcagcatggatcagcaactcggtggacatgatcgaatctttgatgaccttgcaaggggtaactgatcgctctgcgataggcattcgtctacagcctagtggtcttgagaccccagggcggatctccttcctggctgttatttatgcacttcctatctcggaagatgctgggccttttattggctcttgcttttcgtggattttgctcgagtcaatggtgtatggcaacgtgggccttccagagtttgagttcactctggatcatgatggggatgcgacgagcttatccccccgggcgttgcgcgttactctccctagagtttaatagatgagagtttatcacaatgtatctaagttggcggttgtttaatttcttattgtatagagttactctacgtaacagctttgaaatgtcgattggtcatgtccggacttttaaacaccgtcagtccaatctgggaacattgttatgaataccatcattatttatttttcagtctcgcaagagccataatttttgtctccctttgtcgagagcgcaatgcgtctgacgctaaccagggggctctcctcgaccgctcaggccacatcttctttctcctcacccccttctcccgacgaactacctctccctttccacatgaaaagcacactatattggtcttaatcatctgtatggtgctcgtttcgtacggagtccttcacagaggcttcacttgaaatatatccagcctcgtttccagccgcttcggcactttcttcgatgcgaccatatgatgatcaagaacggtcgcaatctgtgatgaaagtcgggttccttcagtggccctacctcatatcgcaagtaaggtcgacggtcggtcatgcgaagatgttacacccattacatttcgacaagcgcccgatcgcccagataatcacaagctattgatcattggaattttgccgaagtatatcttttggacgatgatgttatcataaaatccttcgcagccagagtgaagaagatatgcaacctataatccgcgaagctataagttatgacattctcggaacccatccacggattgcggtatggctatcacgatcggaatatatcgacatcagtactatctacatggcgacgttgcaaaatattgccaggagagctcgatcacttccgagcttcgatctaaatggttccagcaaatcttggaagcagttgttgttattcacagccatagtgtgttattcattcggatcttgccctacggcagtttttcattgatgataattcggatctacgactcggtgatttcaactcttcacaatgccctggtcatatatcaccacactgcttgccacaagactatgaacttcctaatactgaaacgtccgatatctttgccctagaatctaccctctacgagcaagttgctggtaaggccccatatagcgaactctctcggcctaaatccgatgatctggatattatcaaaagctcaaatctgaagacaacatatggtagatcgtgaaattgaatatagttcaaaaaccgcaattttcctgatgtgtctgatctattcggaggagaaatcatactaggttgttagagaggcgaaattcccactgctcaagtggcatttgatttgtacttgaaagatttcgtttaattcatatctgaatacaaaggtaggggagcgcgaatgtccattcaaaccactccattcaatcaaacccaacaaacccatcaaaccaattaaaccaatcaaatcatcaaacccaaacaaagcaaataactaaagcaaacaaacaagttgtacactccacgacccacttgtctcagaaactccaacttctgacgatacatggggtcactccaggtagatatcactagcctctgatttgaatattgagattcagaatagaaaaagttgatatttcatttggacgactttgattcagacagaagaaagaagaaaatgaccaagaaaatcacgacgttaagagattcagcttccatgacttgtaggacccatctagatgaacatgggatgatagtagcctagttccttcagcgttatagtaggcaacagtgacgatcttttcctatcatcgaactcgggcttgataatgaattcgtgactgttgtcgtcgtgagaagatgtgaaatatcccatgatgatcttgtgagataagcagacgtctataagatctggtcagagcggaacttttgcgagaataatccgatctgatttaccaaatgacatgtccgtttccttcatcgtgcattatccacgcaaccatctgtgcagcctcttgccacgtcgctcattgtagacgtgcttattcaaccccacacttttggggacggggtcagactggtagggccaatgttgaataatatgagcgtatgatgtatctgtggcatctggttggaggcctaagtggagggccgacagaattccggaatcttcagttgagactgtgtcataaggaacatagcactgactttacaattagtaatgtgctttgttctatgctttgttctattgtcgatattactggcggactgttaaatcccacacagagaagctcttcaattattttggacgctgaatgaaccaagctcgcttaagttggtacccaaaagtcccaaatctcgcgatcgtgccactcactaacggcacgagaggatagaggtggccattgcaaaaagaagccccaagtatttcttgggacttggatgatatttgtgggagttgagaaggttgaagaaagaagaaaagtgaggagatacagagatgaggtaaggtcgctccttcctcaaaactgttgaggaagtcactagtcacccggacatccataacgatataaaggaaggaaacaacaacatatgtacagaacatcaacagcacaaaatttagagtctaatcataatacttagcaactacacccccaatgataggctggtctccgatttcactccgagccacacctttgtcaacccccttggccactctcgccttcacccactcgccagcagtgataccaaccgcactattatcggttgtctggtcatatcccagacgatgcagcacgtcactcacaaccggtcgcagctcgaggctatcctccggtcgaacaaagtacaaaacacctagacgatctacatccctctgatcgggcggcggtgcaacaacacggtgtatgctgctcttgaggaagccgttggtgaggaagtggagagagtccgcaagattcacggtgatgctcccggggtacggcttcacccacttccactcgccctctggggtgcgaacctgcagcgcagcaacgggttggcggaacagcagagtcaagctgccgaagtcggtatggcccttggaccaaatcccggcggccttctcgttttcttcgtctgaacgccggtggtacttcatgtaccgtaggtggcagtcgcttttttcatcatagcgatgcacttttaggaaatagtcctcgggtagctcgaggataatggcgaagagcgtgagaagtttggccgcgatttggtcatgaatgtggcgtgcgaagccttctataataggacgattgttgttcacaatgtccggttggggaagctcgagggctgggatgaattttgggatgttgtagatttctgtcttgtcatagacacccggactaatttcctaacctagggttagatatgattgtttctcgccgtagattatcggcattcgacttacccggagacccattggcttgtagccattgtagccacctttctcaagctccgcacgatacttgagtttctcctttattgggagcttgaatatctccttgccaatagcgaattggcggtcaacatcttcctgcgagagcccgaagttggtaatataaaagaagcctaatgccagataagtatacaatcatgggaagctggtgttggaaacatatactactgacctatattctggatagcctcaaaaagttgcttggctaactgctctttaccgccgggctggtcgaacagagacagatccaaggtagcgagatccgcccagtccactatatgcaagttacacgttagcatggtgtctcaaatctcggctaggaccctaggttttgcattaaaccacttacgatcaaaagtagtctccgggacctgactgtatgttgggatatcagatcccgtaggaacaggggctggaggttgggtcaaagttgccatggttcatgcaagatagtggaagaaaatatataaaaagaatatatcacagcaagctggagtagaaggatttggttatggagacaatagcgtgcatttgcactatatctgacagatggggggtttatcaagatcgcgatatccttggttttgtagcggatttgtagttgacccttgagcttattgttgaatccattccaatcgggcaatttgtaggtttattccattgacagcccgcaaggttgatatgcaaggccggccagattggtgcgagtgcaggtggacctctttacgccacgtgggctttagatctcatcatgatatcctccgtttgcgtgatcagcgactgttccctcactaaatcgcgacttacgcacttctacaatatttccaatgataactccaaataagggaatgaatgactttgaccgggaacgtacttatgaggatattaactacacgattttactaaattcgatatataattattgacgaaagtaaagagattgattccaaaaatattcgaatagactatctccatctggatttgaatccaattgagactatattgtatgtcaggacttgacagcagcaagtatggcctaggccatagcatttgcaatacttttcgactatgatacaattttttatctgctaggtttggagcttggtctaagcttctataatgtttttcggagggtttccggactgataaaggagatgcatggcgatctatcaatgacaactcgcgtttaaccgggactgtcaacagtaataatttgagaattatactgtcgaaagcaacatcgctacaatggcagacagagaagacgggcgcatctcatccaaagatttgggcaagaccacggccaccgatattatttccaccagtgataccgataccaatcatgagcttcattttgcgagacgtggtgaagctcttgaagaagcctcatcaagcctggaaaccatcaatggctacgatccggagcttatgaatggtaggacactgctcacggcagcagaggaaaagaagctactacgcaagatcgactggcggttaatgacgctttgttcactcatttttatgtttaagaatctggacagcaacaatgtgcgtatacacaaggatactaggtgggacattataactgacagcctcgcaggcatccaatgctcgaatcatgaacaagggaacggatcagaatatcatgacacagctcggaatcacatctaacgagtacaatcttgtgactgtgctttactatgtaagatatccagcgagtcttgatccagatgccgtggcgtatcgctaatcatatgtgacaggtcccatacattttgctagaagcaccctcaaatttactgctcaagagatgctccccttcaaagtggcaatcaaggattatgatcagctggggtatcgctctcatgtgcaatgctgctgtgaagaataagggcggtttatatacgacacggttcctactgggtgtagtacgttaccgcgccaatatgtctcatgattccaaaatggaatagactaacaccgcaataggccgaggctggacagttccccggtgtcattctccagatgacttactggtatcgcccggacgagatgtccttacgactgctctacttctgtaagctacacacgatccgctcgcaaaacatctcgtactacatgaaatttttaactgacgatataaagatatttgcggaaatatctcgggtatcttcggtggtcttcttgcctatgggtttgacaacgcatctggtgcaggcggcctttccgggtggcaatggtagcgttctcttatatccattcctgaatccgtactaaaattactctaggttattcctctcagaaggcattgcgaccgttctttttggatttgtgatttggttcttactcccagactgtaagggtcatcctttgctcataacacgacgccagtgactgatatgcgaaaacgcgagatagttcccgagacagccaaatggttgactgagagggagaagaagtttatccaggctcgactcccatctaattctccccgtggaaatgagcagcacttcaagctgcgtgaagttatcgagtcactgaaagatcggaggctgtggctgtttacggccatttgggctacctttactgttggaaccaacggtgtcacattctatcaatcgacggttattgccaacctcggatacacgtaagttggttactttccgcatacagttatgacttcaacgggcattgctaacagtctcttaggagcattgcccaagcccagcttctcaatatccccatcacgatctgtggtctcctagtcattgcggctacaggaattacagcagaccgtagccggataccccggccattatacccacttaccttccttgttatcatcatagtctgctacggggtctttgttgcctatccgagtaatgctgctatatacgcggtaacgctgatcggaaatgccgtgactgcatcatggtacccagtcatgtggtaagtttcctatgtcctcatccacttcatatgtttgtatagctcacaacgtgataataggccatggcgcgtacaaaccacctctcgagctacgggatccgccttctctatcggatttgtcaacagctacggccaaattggcggcgccattggcccgcagttgtttcaaagtaaatttggaccacaccacacagtgcccttctccgttgccatcggtcttgtgggtacttgcgcgatcttgacggtggtgacgtggtgggtgacacaggagacggagcgtgacacgaggcggctgaagctagctaaaatcgcagcggaaaaaaggggcgagacgattttggaagatgttgtggacaatgacttgaagaacaattgagggaagagctgttgacaagcctagatatattgcggaaacctatatacaagctgtagattatagaccaaagcccaactccatcgttaacaaaaattcagtgaataatatccgtgacgtgatgatcttcagaaaaaatgatgttcttttactttgtatgatgttaattaccccgatatccaattactccaagttccaaaaaaggtccgagaatcgaatcaaaatcgcgcgatctccccgcggctaataaaaaccctccgactccatacatacccctcacaatttgtgggaacctcttcatgtggtcttctacatgattattccttattcgcagacaggtttctgacacagcatccttggtattcggctcatctagcttggacaatgaactcagttgacacccaatcgcccgcaagggctacgagtgacccctactttgacctgggaacattgagccgcaaagtcagcaccaattcccaggaagcccagatatggctcaacagggcccttgtctggacatattgctttaatcatgatgaagcaatcacctgttacaagcaggcaatcgcgcacgacgaaaattgcgccatggcctactggggggtatccttctgctcggggtccaattacaacaaaacatgggcgctgttcgaccaaagagatcgactcaatgcaatcaaacagtgttatttatattctcaagaagcactgaggcgggcaaacaatgcatcagattgggagcaggcgctcatcaaggctcttgcagaacgttaccccaacgatgatccaagtagggatcttgcaggatgtagccgagcgtatgccgatgccatgagagaggtgtatataagtttcggtcgcgaagactttgacattatcacactattcgcggacgcattgatgaattgcgcaccgcggaagttatacgacgcctccacggggctgccgatagcgtcttctccggtattcgaagtgaaagatctacttgatcgggcgttgaagatgccgaaagttgaacttcatcccggtcccgcgcacatgtatatccacctgatggaaatgtcggcgactcctgaggctgctctgccggcagcagagatgatccgtgaaatatttcccgatacaggccatacctttcatatgcccgcgcatattgatgttctcgtgggcgattatcgccgtgctgtggaatacaatctgaaagcgaccgtcgcagatgacaaattctttgaacagaatggcggcttgacattctacagctattatcgcttacacgactatcactccctcatctacgctgcgatgcttggtgggaaatcaaaggcggcattgtcagcgacggagcgaatggaggcgactatcacagaagaaattctgcgcgtcgagacgcctgcgcttgcaaactggatggaatttttcaaggccgtcagagtccatgtgctcatccggtttgggatgtgggaagaactcaagaagctcgacccgctcgaagataagaatctctattgtgtgacgaatgtgatgagacactatggaaaggccatcgcgtatgcggccacgtcgcagctcgaggaagccgaccaagagcgagagcttttcaaagccgcttcgaagcttgttccccccacacgcctcgacttccccaacaaaatcaccgacattctcaaaatcgcagctgctatgctggatggcgagatcgagtatagaagaggcgattatgatgaagcattccgcagattacgggaggcaatcactctggaagacgagctgcctttcgcagagccatgggggtggatgcttccagctcggcatccatatgcagccctgtcattggaacagggcagagttgagcaggctgcacaggcttatgctgaagatttggggcttttcccgacacccaaacgcacccaccaacacccgaataatgtttgggctttgcatggatatcatgagtgccttcagcttttggatcgccatgcggaggccaatattatcaagaaacaactttcccttgctcttgtggaggcagatgttgaaattacatcttcatgcttttgccggcttgggaaattgccctcaccttgtggaaagcttaaaatgaatggttgccacagtgtggggtcgacgtgtaataagagctagatgaacattttgcataaattaacattgttccgctggcttctcgtttatgatacatatagaaagatgtaaaatgtaaaatctacgcgcccaccaaagtaggcaacaaatttatcatgccaggtctttcgggaacaccttaaaagaatacgctataaacacgggtatcacaccacggcatctgcaacttgcttgatcatcccgcgaacctcatcaacgatacggaaacaaggcaccaacttccgcgctatcggatcatgtggacagagatcgagcgggtcgtgatcaacagcatcctcctttctccgacaacggccttcagaattggggcaattttcgtgcccgaccatatggcgattgcgttgccgctgcgcaaactgttcaccgaacaccaaaagccggtctgtatctgtctggaggccgtgcacgacaaggtcccggagcttctcgccgctgatttgtagattcaactctgacggtattccaagcccacagtcaagatagacggtcctagtctcgttgctgatatctagctcagtgcagtgcttatgcagccagcggatgtacctttggtagccggatgttatttcaaacatgagctggccgatgaggagcacattttgaaccgttactcgaggcggtttggacacatcgtagcacataggacaggtcagtagtctctctgtgagggacacgcctgcgcggagcatcggaacgatatcgtgtgacatattcgcgcggctcaagctccggattatatcggaaacctcttcgtcgcatttacaagactgagagaacgacatgggagagacgtatgcatccaaggctcttgagggtacctccgggttatgcaatccgctctggcgtgatgtgtgcaatagctcaatgggaaaggaacacatatcgccgttcccgagcatctcccagtgcgaggaatcgaatccgcagctaccggatagctcgtatggtaatgagtcgaactcaccggctcccattaacatattgccggcttcatgagagtcaaagggcgattgagaaatgacaggcgagaaatgcgaggagcttgaagatcctattcgctcctcttcgttcggtaaatcgcggtctggttcctcttgtcgtgcgcgctttctcggccttccaggggctcctttgtctttgaatttacatgtcaatgttaagccccggcaacgagagcaaccactcttttcgcctgagcatctgagcttccgtgcccctatttaacattagccagacattcaaggagtggagaacggctcagctcacggcatgcttcgcaggaatttcgttgtcgagtgggatacatactatgttgaatgtattagtttgatctaacaagcacaggaccgaggtcggaagttgacgtccaggtggaattggaggattggtcatcctgcgctgagatggcgtcaaccgagcttcgagcggggtagtgcagcctctgagcagcagattctatgcatcatgccgagtcagtgattgggatgaaaggtgtcaatagaagacatcaaaagctcaagtattgcgtgtgcttctgaatatcaatgttcggagctgtggtttgcgggtttgtcgaaaatcctccgagaaaaaactgccgagcttctgtgtagcgtcgcttcgctgtaatttccatttatttcctttcaattcaatcggtaaattttcattctggttgaacagcaaaatggccaaatccataaccgcacgcgaattgcgtcagcattgggtaaatcaccatgaagttgccctcctcgacgtccgcgaagaaggcccctattccgagtcccatcctctattcgcactaagtgtgccagtttcggagatcgagaagaagttgcctccactggttcctagattgtcagccccgattgtggtctacgacgacggtgaaggttatgcagctcgggctactgtccggatattagcgctgggatatcgagatgttgccatcctgcaaggcgggctttccggctacgccctcgttggtgaggtctatcgcgatgtcaatgttccatccaaggcttttggcgagcttgtcgaatcgatcaaccacactccatccttatctgcgcgggatatcaaggatgttctggagagtgagactgatgtggttgtcttggatgcccggcgttttgaggagtataaaacaatgagcattccccggggccgcagctgtccagggggagaacttctatatcgctttttcgaagctgtaccctctccggaaaccacagtggtcgtcaattgtgcaggtcgaacgcggagtattgttgggacccaatctttggtgaattctggaattccgaataaagtggtagcgctccggaatgggacgatcgggtggacattggagggtttggaactagagactaaacagacggaacgggtcccaggtccttcagttgaggcattacaaaaagcgcgggaatacgctgaatcgtgggcgaatcacgtcggcgtctctattattaatggcgatcagctcactcgatttagtacggagtcggaaaatcgaagtctgtatctgctagatgtgagagacccggaagagtatgcccttggacacccgaccggcttctccaatgctccgggtggtcaattggtacaagccaccgacgaatgggtaggtgttaggggagctcgcattgttctgtacgatacggatggtgtacgagggcgcatgacagccagctggctcttgcaactcggatgggaggtgtatgtctttgaagagcgattggcggtgcctgataggcttgtgttgcctgaagtctcttcgtggaatcctccaaaggatggcgctatcacggtgaacgaccttcagaacctcgagggagcgactgtggtcgatctcgcccgcagtccgtcttatcgcaaaggccacattccgggcgcatggttcgcttctggaccggaacttgcgcgagatctgagggctatcgacggtgacggccctatcgtgctgacctcgcccgatggtgacgttgccgccacgaacgttgacgacgcacgcaactcagtctcacgacaagttctgtatctgacgggagggacaacggcctgggtggctgctggtcaccccctcgagaccgaattgcgatgtttgtcgcagccaatcgacgtgtataaaagaccgtatgaagggacaagtaacgctcgcaaggatatgcaaggatatctcgactgggagtatgggcttgtcgcgcaactggccaacgatggggtggcgtgtttccacgttgtgcgggactcgcgtgagaagctgcactgatcggaagtgtgtaactctcacctagctacaccttcttgaagcaaaggaattaaacataaaaagtaagaataaacctacatttgcgaaggcctgattttgctgggtttatgccttaatatgccttaattatagaccgctttcgacaccgctctagaccgtgtaggtagtgtaaattgaagctattcccgccctagcgtcaggaaccgtccccgaccgcataaaccactgaattaaagctattttcaccccacaaaccatttgcacggtcgtaacagcttctatacctataaataggtgcatacggagattggtataaattcttcagagagatttgtccgttcgcaacagcttcaacgcctagaaatgggatatgcggagatttgtatgacgggaatagcttcattctttttacaaagttagttccaaggttcgatactttgcttattaagccctctgtatttttatttctgccagtctactccgtaaaacacctatgctcggctctccataccaagagatagggcagggtctctttcgtctaatgaaacttgcgaatactatacgtatcggaccagtagtggagccatcacaacgccttttatgagctaaggtaagacattaatttcccaagcactctcggacctctcgtaccctaaagacgattgcttgttgatatgtgtatgcactttgaagctttttcctgacccacataccggaaggttatcccaaaattcccttaatcggaattccccactgaacccaaaagtaagcacattatttctctataagtcatatgctctcacttctggtttatcacttccttcttgcgtagttagtgcctacattagtaactaagacagcattcgggtgaataggctgaagggggctgaagactcttgccaccgagcctgccctggccccctgactatcctcacggataaagagagagcgcctatgaaggctatcaagcaggttagtattataatcctaaccctttatctattatctactagtaaactattatctataggtcttcccagataccatcaatatgctttccctctggcaaattgcgaataatattgagaggcatgcaaaaccggctatccacaacttcgttcaccgtacaatgaatctatggggttgagcttcctcaactacaatttttggcttggaagtgctagacaatcgactggtcgcatgtgcagcaaagaggcagatgcagcgtttttccctggaattgaagtattgcgatgaaatcgcggcgtatctaggcatgtgcctacggattccaatttctcgcccccgcaaatatcttcccacagagagttaatcgctctccttgaagtaaggggagtccacttcacattccgtatatgcatgaggcaatttgccttcgtacaggaaatcgcgtataatatttgcagcacatgaggaatccaccgcgatagagcaatggccataagctttgacttcgacgatttgtgaatcttgaaatgcctccttcgccgagcgggcagatgtaagaggagttacaggatcccaagtagttgatagaatcagcagcggatgcgccgttgtaactcccttgcgtggtacgtaagagtgtgtcctcggcatagtccactgctgtctcatgaagaatattttgctgtgtctagcgccgaacatactctgattgaacgaagtcaagatataatcaagtagcggttgcctgtcttggggccaatttttgggaccactcaggccatcgttcaatctgataaactcgcttgcctcatggcccatatcccaagaatcttcacgcccatatgcaagaaaagcatttgtcgcatttccttgaatgagactgtacaagttgttggcaagtgtaccccacgtggagggatagtaaagggctggtaaaacaccatcataccagagctcttcataccctagtacaccatgtgctgtattgttcacgtacacaccaattggctgttctcggagcctattcatataagaaaggaccgtatcgcgcaattccacagatgttgcgagcgaggatagtgggcatttttttgtgcctgctctggtacactcttcaaaaaacccatcaagtaccttgtccgtgtcaacctgggactctatttcaaaagtaccgtcgtaccatttgaattggttcacgacaccgtcgatgatgacacgtttcgaacgctcggggaacagtcccgcgtaggtctgccccagaaggctgccgtaactgaaaccccaataaaccatgtctctctggccaagtgcatccagaatatcattcatatcagccgctgtctggggagtgtttaaatacttggcgtgttctcccatcgtatcgtggcatgccttgacaaagttctgtgtccatgcatagacttcagggctgtcaatctcgacattgcgagatctgacatgagctaaatcctttcgagatttgacatcgggatagcaggaggctagcggcgtcgagctattaacaccgcgaggatcgaacgagactaggtggagcccttcgccaactatagccctcagctgctctgcattctggttgaggaattcgaaaccactcgctccagggccacctggattgagaatgaggttctgggttgcgttcgtgccgcgcatgcggatgagtggaatggtgaagattttatttcccgagttgctctggttgaattgatccatggggacaaaaacattgccgcactccacgaagttccccttgatgaatccacaaggctcccaacttatctgttcaccagtgtatttgagggtcctatgctggtgccatgttggtatttctaccgaccagtgtttgagagcaaacgaagaacagatcaaaatcaccgagacgatggcccaatatttcgggcgagaagcctgtaattgctgttttctggcgaaatctcccagcagaagtgattttttcatggtagtgttttcgcttgcttcagctcaagtcccgtgggtcacgaatatgaagaatgtggctagacaaaagatgagtactcggagtagaaaggcgctttcattcgggtgttgttatgttatgttgttgcctacccgtgcggggattccacaaggcggaaaatggtagtgtgtattggcggcgaaaacgtattcaaaagatcttaccccgtacatgtatcgccgttgatccatgttgtatctttatttgagtttcactggtattgtattgttccgctagtagtgattgcatggtaggaaccgcattgtccaatatggcccatttcggctgccgtagatattagtctgtactatcgaagacgtaagatgcttacttcgtatctcaataaattctctaacttgtcccacagctgtagtctataattctcagctgctttatgttcccctccaatatctaaactgacacatacgaccatagggtgtggaaaatagggcttcccgtccgctcagccgtactcaagccacacgccggtgagttagtagttgggtgggtgaccaccagcgaatcctcactgttgtatgtttttttttttttactcggtgtgaatgaaatatagtaataacatatgtatttgtggaactctataataactttttagaaattaagcttaacgagacataagcatttgacatatctatctgacgctatgaccatctagagagagaggtcacctgacccaatgatgacgatgagacataagctctaaaatgacaatcttgtggacaacttagtaaacaaaaacaaacaaaacaaaatgaaaggattttttttttcgccagaaaactgtgggactggtttttctgcagtaaaaccagcctggtaaatcacgtgatccatctgtatcaaggatgatgtcgaatttcgtacagcgtaatttaccactagaccataacaaaaactaaggttcttgtttagggcctagaggggccatatcccattcttgacagatgaaaaaatgacggtattcatcctagagtctgacatcaacttctcttcttgttgtacttctcttctcccttttctcaccacttcaagccgataacttcctttccccgttgtctcgttcctgagcaaagatccaaaattcctttctatccaagttcagaaaagcctcttctgttatttgtttgacttgcacaatctacaatgtcggacctgcgaagcttaagtccatccgtcacatcagaactctccacctccgaacttcaagtatccctgaatcatactttacagggctaccagcctttgagttcaacagacgacacacctttttttctccagattgttttcaagtacctgcccgcagacggacagcgtaacctgatcgaagacttatctggatgtcaagatgaccaggaggttagacaacttgccgagagcatagacacaggtcttctccgccctatgttgtctaccggtggtaaaacaccggcagtcactccctcatctcgtctcggtcttgaggactcgatcgaatacttgaacaccttcgatgtggaatccgtgacacgagttgaccagcagcgactccgccaggagtgcttagcccgcgatggctataaatgtgcgataacaggaacctgggatatggataccaccccacatccccccgggcggcctgtacacaagttgcaagcagttcacattcttcccttctgccttggaaattttcgcaccgacgacgagcgagttaaaatgtcggcagtatggactaatatctttcgatggtttccaaatttacggtcccgtcttaatatgttattaggtgatgttaatcgcgaagataacatcctaatggtggcttctgtttttcatgaagacttcggcatgttccatttcattcttgagccaacaacagtaccaaaccggtatcgattgaagaaattcccgagacgctcatgccttgtgaattatccgacggcaactttcatcacccttacaaacaatgataccgtttcagagatccaaacccagagtttttagctgtccatgcagctatcggtaatattctccatgctagtggccgtgctgaactgatcgagaagctcctacgagatttcgatggcgctgatcccttcctagcgaaagatggaagcaccgatatcagcagcctgctttccgtgagttgtctgtcgcttttgagttcccgcggcaatacaattcaaaatgacgaaatcaccaaggccaagcgaagacctgttcaagctgaactgcaaggaacggaaaatcagaagcccaggtcgaatgactcgggccatttgccacgatgagcgatacttatgtctttcttttacatgatctgccggttgcttgtcgttccctctacccccggcgctatatcactttctctttattttcaatctcatggctattagaagcatgtatcatggggatctccgatactggattaaacggctcatcccggagatctacggagtgcgtgggacgtactatgctattcatcattggtaccgacccggacaatgggatggtttgttgttgaaggccgccagtggtggggactcatcgcagccggagaagatgatcaaaatcgggaatctccatgtgctgaccttggtgggagatggggaatatctgcccaggcgtaaatcagtggacgttaactggattgttttgtagattcggatctttgttattgattgcacaatctgtctccgtatacgctctagaacagccatacggctataaggtgatacgtaaaccgtctctggcacggccgagaaaagaggaaggtcatctgtcacgaaatatcaacaagccccaaagatccaaaatagtatattaattttaaaatggtagatcttcttcaccgcccgaccactcaccaaacagcgcatctcaacacatcaccgttcacagctcaccacaagactcaccatgaaattcaccataacactcatatacctggttactctataccttaatagctgatatcgcaatcaatagcggcggaggaactctatcggatcacaaactaccaaggcagaaggaaggggaatacggcacccgataacaaagaaatttcattcatcaatactgcggtcttggtgattgaatttgcgagatctatctaaatcccattagatctttccaatgatgatgattcttcggactacaaaccagataacgaagatgttatgtaggtctttccttctccgattactcttggaatacttgaatactagtcaacgccacaaagaggcacctacacatcgctagaggccttattcttacagcatccccctgcgtagaatactcttaacgcgaatcttatcctgcaaagcagctttcacgtcgcggggctcaatgcagcgacagccgtgaccacaaaacctctcaaatcccgcagacaagcgagggacactatgatacatcagagtgtgaaaaccaaaatcttgaattaggctaaatgcatctatcatgctaaactacttagggtatgtctcccactagccgccattatcaaccagcggtagacatactggaagtagctatcggggagtgtgtcgccagatgaagaatatgtgtctcgtagcatttctcttttttgaatatttgaaaagctacagattgctggtgaagattgaagtaaagttaggcaaaatctcgtatctgttccaacgcatacagtttctcacttccagatacccctcaggccagttgctggaatcggtgagtgacgtcgaatatggaatatgcaggtgtcacctagtgctatgactaatcccgaagtttacccttaattccccacctaggaaaataaggtttacccttgactcccgaagattacccagaatcacaagacactgttcaagcaatgccatttgtggaaaatggaggactagagtcgtgttcgtattaatgagaactgtgctcttttaggtttgtacccgggaaatttgattcgatagttggccctgttccgattgagtctgggcctagggtaaaagcccattcccgcttcactcccacttttcctgcctgtggctaatcgctcttgaccgggcttagaacgatcttaagaccctccggccgtcattcttacctggcccaaccacttctcccttctcacctgactgaaaactcctggtggttattaccggcagcccctgcgaagagaagtgactgagtcttctcgtcgcctttcgtcgttttcaccttcataatgtctcaaatccaacaagaagtcaatgaaaacagccaaggggcaagtatccacattgcaaggctggagaccgaaccacatcgacgggaattcgccgccatctcaccaaatattgtttccaaaacacgccaaggggtcataatctttttcatcgttgcaagcaacatggtacaggtgaggcaatactcctcactgagtaaatcgacagactttgacagccgaccagatgatttccaacatggtgggacttgccgctggccttgaaattagtagggtgttgggtgcacctgttgggccggggaaagccaactgggctgccgcctcttatccgtgcgtaatgtgacactaccgctatagccccgttcgagacacttactactcctctagattgacacagggcacatttgtgctggtcagtggccgacttggctctgtgtatggtcaccgaaatgtgttggtcgccggctctatttggctagtcctatggtcgttggtgaatggtttctgcacgacgttcgtgtcattcaacgtggtacgtgctctttcgggtattggcggggctttgataatgcccaatgcggttgctttaattagctcaaccatcccacctggtcgatcgcgaaatataacgctcggattcttcggggcatctgcgccgattggaagctacctaggagctatctgggctggaatctttgttcaatggactagctggaaatggatcttctttggcctgtgaggtttttaagacttgacctccttcttcaagatactgacaaatgccacgacagggcaataatgggcgcagtcgttttcggcgccctgggagcactgctgccacccgaccgtcctgttgatcgatacggcaaaatagactggatcggtgcgctcttgggcacaagcggactgattttgtttaatgttgcgtggaagtaagtgtgtcttacatcgattttgtagcagtttggctaacacctcttagccaagctcccgcaagcggatggaatgctccgtttgaaattgtcattataactgtgtcaatcctgttattggggctgtttggcctttgggagtacaggtttgcagacactccgattatgccgctggatatatgggcaacgccatcatttgccgtcctcgtttttgtggtcctgttgagcttcatgtccaatgggatctttctatggtacatggtcgcttggatgcagctgttgcgaggaaagactatactgcaatttggaattgagtggacgcctttcgtgatcgtggcaacagcgggcactttcattgcagcatggctcataccccggcttgcagctcagtggatactagcgattggctccgccaccatcttgattgccaacatccttctagcaactatgccagtacaacagatgtattgggcgcaggtttttccggccacgatattcatggcgttctgccctgattttgtctatgtggcagcccagattgtcgcaagtaacagtgtcaagcggcggcaacaaggaatcgctgcttcccttatcgcgaccctaaacctctatggtaacagccttggccttgggtttgccggcactattgagactgaggtcaacaagaagagacccgatcaagttcttggattccgggcagccctgtatttcggcgctgggattgcattgttggcggtaatcctggatatgctcttcgtccgagtcatcaaagatgagcgagagggttggagtgacccggccgatcgagaagaattcatagaggaaagctccaccacggcaatcgagctggccacatcaatggtacatggagaccggacgtaggtctgcgcagtctttcactgcaacaatgtatgtttgaggggggtgggggggtttgcgctgaaataaggaacgagtgaagggtcccgcacaacctgcaaaccatccctgccttcacaccatcaacgccttcgttaatctcctttctgttctgtgccaaccttggaagtaatgctcttccgtgatttgctatcggtccctaggctccctccagattgctagtctgatgcattacgttcccttcttactaggcttagtatttctcatattcggttttcactagcatttctgcccaacggacgatttccagcgtcctcatcttctatgattcctccctttttcggttctatacactttatgcatgggtgaccgggccaaccgcctagagcaaccgggaaggcattaaagcaattatcaataaataaaagcttggcgatatggggattaagccatcaaaaagtttgagtaaataaaaagaataagataaaaaaacatacaacagtgaggattcgctggtggtcacccacccaactactaactcaccggcgtgtggcttatgtgcggcagatagtcgggtgggtgtcgcccgggtgagaaatgggtgagtgctgctttacggtcgcgcgaccgggggtgataagggtaagtgcgctatagacagggtgagaatcagggtaagaatcacctaggtcgcgcgaccaccgcattgacccctttagctgaactaacggcagaatatcattggatcatattgtttcccttagaacactcgatatcctggcatctgtatataactagaactggaagtatcatacacctaggcagtaggcaagttggcaatactaatcgatttggttaatctgctcaaaaagctatcttgaaatcgagctaaacgcactcggcgggacttataactattacaggccaatcagagcttagtgtaatttagatataacttaagctacttgcctaactagctagtgactatttcactaaagtataccttatttgtcctgattatttagagtcactggaataaaatcctgtcgtagttgtttcgaccttttgattgatgggtcataatgaattcgactgccttcctcttttactcatctctgtataccttttaacttttcgtgcgttttatcacgcgaacaaatcactatcatagaagaggcctcaaatctcgactgcaggccctcaacttggtctgtttccgccttaggtgctattattgaatggtaccgtacagctgaccactaagagtttctctcaaggtctgcccgtaaactttcatatgagcttcggggtatgatcgaggttaaggtcatttaatgatatagttagtcgggacagaagttgctggctgaggacgtctcttctaaagcaatatcaatttcgggaccttgtgcttttccgtcttccagatcttactatttcctcacgagtcggggcagggatatgaggatgggagctgtatgtataaactcccttattgggcatctccataaccaaccaactccgaatcgagtacaaacgccagaaaacattatggcgccgaaggagattatttcgccgcttgcggagctgctcttgcttgacaccactcaaaatgggtgctatgtacgcggtctgtggaccttggagtccagaaactaactgtttgagtaactacctgggatatgaaagaacagagggctactccgatgtaatatatattggaattatgcataggcttcaagagcatatgcctcttttcatgcgctagagagtgaatgctttgaaccatgtcggccgtccattctaagtcgttattttcctaagcatgtagattgggggggatagaaagagataaacagaagcctaactaatcctcgatccgctgaaggttgaacaaccacgatgatggcctgtaccgtcaacaaaataaaaaggtctgatcaaaaccaagtgtcatcctattcataataaatgtcctgttcatagtaaacggaagcaggagtggtaagtgaccgcaaaattttgggtcaaataattattggcctatacatacaacagaaaagatagcgtgcggttggtattcacaagtactctgagaatttaacaaggggattgatatactcacaccccctttggctaatccgacacccctttggctaatctgataccccctgcctgaaaattaaggtatgcattcctaattgggtaccgcttttgcttcgacacctgtgcctgtctaccgcattccacaccgccttctaatttcatacaccgccttcgtgacaaagtctccatacaattatagtgacacagtaggtacctgcaatttgtatgtaaacccctaacaaaattaagtcactttcgttatattgcactccatatagacaagatcaaacaaattgatacttcaattctggtttacatacattaacttgccttcttccacctcatttttgacattcattttcatccaaatccctccaatttcatctgtttttatcagttttcatcctcaatatggcctcactaggccttgaatacctcgaatacctgctatcctcggattccgagacagagatcgtccccgagtctccacccaccgagccaatcaccaagccaatcaccgagccaagcactgagccgccaagcactgagccgccaagcacccagctgccaagtaccgagtccacaccaagctttacgttcccgcttccgccaatagaccagacgtaccctacctcggaggaagcgattgtctcgattaatacctttgcacgcccgcatggatatgcagtcacctctaagcgttcaaaaaacactaagaaaggggtgaaaaaggctgtctatctctgctgcgaccgtggctgtatatatataccacaggacttagagaagaaacgacggacaactacacttgccaataattgtccctttgcaataactcttcgcctcgacctctatatagacatttagcgcctaactaatgagaatcctacctataatcatgaatcctcaccgccgtctacctatgccattcaacggtcccttgcgaccgacagctgatcgaatgttagaatgggaccgctaatttttagcgcctcttggcccagaggaacatgtattaatccgaattccgagagctcggcgaatgtcagatatcagcgaatgtcgggattcttttaggggttataataccctagtacagaagaagataggatttagtggtaaagataatactgtaaataatgatcatggggtctttatgaacgtctattataagctatgaagacatcctagtataaagagagatctcgacattcgctaagacccctctgagcagatagatggtcgaaacgcggattaacacggattaatatattttccttcacgctaaattagcggtcccattctaacattcgatcagctgtaagcccggtcccttgagctgggtccacgggtggacggtacgctgagtaagctggaaacaggctgcctaggtggtccacgtgagagtgggtcacggtgacacactaacccatttccgcccagaggcattatagttcctagacttattccagctctccagctttccagctttccacctctctatctccacatctccacgtttcttcgtctcttcatcattttcataacactgtcaaccaatctcgtcgcgtttccacgccgtctatcatgtcttctcaacctgtcaatccgcctatgctgcaggaccatgatgccctgagaaaaatgttcgaagaaaaggccgactccatcttggaatggctagaatcgaaaagccaggtctcttatgactatgataccctccgtgaaatcggcgttcttctccaccatatggatgtcacatatgaccaagagtcccttgactttaagcttttatccgagaaagaatacagcacatacaaaatcgacagcgctaggatccctaaacatatgcgccatcactatgacggttttgacaaggcctttcatttgtctttctcatacccactatcagacccactaccaggcaccgaacttgtgtatgagaaggcctttcaaatcgccagatatatcgacatccttcaagactactctaagaaagatgatcccgataatacctcttcgatagagaaaaactcgaactggtatgagatcttgtgagttcggtcttcctctatttccccctattacttataactaccaagaaattgactggtttatttatctagggccgaggattcctttgaggatgggccacaaggaatgttacatggtttacatattgggcattcgaaacctctcgatctttcaagatggagagccgtaagttaccgacaatggcaagaggaccctgaggacccagacacaatccgcccgcatgttatgcttatgatatgcaccggcgcggtagcaaagtctaataaccttctccatggcgagattgggccgattgttaatacaatccagtgccgtctcctccaggaggagtttaagcagacttcgagttttccggtatagacctagtaatccctattataagtgagcgctaaccttataccactattaggttctcgtcatctcgctgtttggcccaagacaggggcgtatgctctatgcccgattcaacatcgacggtactttgattgtacgagcgtcagatatctttgatttcaagaagaagaaccaagagggatttgacctcttcatgcgctactacaactgcgaacccgaagatacggccgtcctatcgaaaactctccatctcccactatcaccatcggccgtacctcgcaagtccggaattgttgataccccaatcacgtcattctccgtatcggagaacgtcccccacgcggattagaacggagtttctagcattattagtgttatttcgtggagacaggtgtgagcggccgcttaatcgtggagaagaattcgaatggagcagggcgagattgttcagtagctagttacgagtatcccatagctaaattgactgtgcttcagctttgtgagcgggttgtgcgcggaaccattacggttagaaggctgaaataagagaaggcctctagcaggggcgtaagtagataccccaggaagccttcgacaacgaacgtaaacaagaagagaacatcatctgatttgatcttgtcggggagagaacgacagcacaagtacggctcgacaaccattattagtttgtgtgtgagccacagctttaacattcagcgagcacagtcagtagcgatgattgtccaaggttgcagagtggcgcgagaacgccaatgttggaataacggatgcatagggatgttaggcagaatgatggattcggagcgatgtggagcagcatatgtacctagaatagatatatactgtgtataagaccagcaaaggttgtgcagaggtggccggtccgaggaagatacgattggctccaggattgcccagaacggaaggtccgaggctctgaggacaaagtcgaacttacaggatggtcaggatatgagcagacagatgtttattagcaaatcgccaggcctatgtagaagatcgcagtacgtaggtagcgactagcaaaggaacaggtagcgttgaaatgtgtgtactggaagtgaaggcaaagaaaacgaacacaacaactctcctctcactctctcctcatctactccagaattcactgtcgtttatccacttttgtcaaaactctcttctataatacctctctgatcaatacattatccgccatccacagctgccatacgcctatcaaaccgcgtgtcgaaatgccgccgaaaaagacgatgacagtgcctgcaactgtcgaggattgggaacaggcagtgcaccccgatgggaccaccattgttgacatcaacgccagcattcacgaccagtaaaagcttcaatctagctccgcgatggaagaagaagacttcctacacctcaaagctgtttggcagaacgtagagtcgaccaacaaatcgcaggcacacattcacctcaggctaggcgcctggtttaacaaagctagccaggatctagacaattatccggatttcaaccggtaccttagtgcagttcagcggagagatgcgcctagctctcgtatcggtatgttctgggctgcttacgagcaacagtgtcaggtcgcgaaatcgcttcacgctacgagcaaggtgaagaaagcatacggtatgaacgaagagcttgtcaacatgtctcttgtcaacttcattcaggcagtatgtgcctgtcatcctggtctagatatcaattgcaaccccgctagggtccacttgaccttcgacttcaggcgggtcaaggacgaaaagcaggccaaagcaattgactcgagggttcatagcctgtcgtgtgaaaccgatggactgcttgagtcaacggctactggtcggatgtatgcgattctcgaagccaaagccagaccccggaaaaagcatgagccgaaagtaagttggcaagagacagctcagatggtgaccgccgcccttaatgaaaggggaacccctaagcacctccatcccggccggtaagtctatgagcgcttgcttcacggcatcatgtactaagacgattattagtgtcatccttttctcgcaggatggcgacgagctatacgtgtccgaggcgactatcagggcaggatatatcaagcatatgaaggacgaacgaaaggctcccaccagggtggacgagtttgttaaggttcagcaatttggtccatattggatccagttgagggaggacatgcaatacttcgcgaagctggtcctagccgttgctctccgagcgagccaggaggaggccacttctgttagcgagcaccgcctccgcccgcgtgaggcctgttgaggtcgtggagacattcccgtttgtactccgggttggagcaagtcgcgatggtcgcaccgaagaaacccttgttcctttgtcatcccatctctcctctctcttcaacacatccaatttctttctagaatggaccgatcaaacaagccctccgcaattggagtgggagcttcccttccccagcccaccctctctgtcaaggacaatgtcgtcgacgcttcgttgcccaccggccagtcagagaccgtgcacctatacggcgctactgtgacctcgtggaagaccggcggccaggagcagctgttcgtcagtgaggcggctcatctggatggctccaagtctatccggggtggtatttcggtggtgttcccaccgcgccatgcaatgtctggagagggtcatagtttaccattttatggtcctaacctggatgcgagaaatcgacagccgttttcagttcccttgagtcctagggttgacccttctgtgccatactcccaatctacattttcgccagagcaggtcgttcagcttctcacaatccagcaacaaaacgaactggttctttcccagaccctaatgagcgtaggcaaccctgcattttcacaggagtgtgcctgcgatttgtccgtcgactctacgttctgccaaacagctttgaggtgtaggaagtcttcttcttccatcgcggagctagattgaagcttgtactggtcgtgaatgctggcgttgatgtcaacaatggtggtcccatcggggtgcactgcctgttcccaatcctcgacagttgcaggcactgtcatcgtctttttcggcggcatttcgacacgcggtttgataggcgtatggcagctgtggatggcggataatgtattgatcagagagggattcgagtcaattgctttggcctgcttttcgtccttgacccgcctgaagtcgaaggtcaagtggaccctagcggggttgcaattgatatctagaccaggatgacaggcacatactgcctgaatgaagttgacaagagacatgttgacaagctcttcgttcataccgtatgctttcttcaccttgctcgtagcgtgaagcgatttcgcgacctgacactgttgctcgtaagcagcccagaacataccgatacgagagctaggcgcatctctccgctgaactgcactaaggtaccggttgaaatccggataattgtctagatcctggctagctttgttaaaccaggcgcctagcctgaggtgaatgtgtgcctgcgatttgttggtcgactctacgttctgccaaacagctttgaggtgtaggaagtcttcttcttccatcgcggagctagattgaagcttttactggtcgtgaatgctggcgttgatgtcaacaatggtggtcccatcggggtgcactgcctgttcccaatcctcgacagttgcaggttcagcttcttccgagaatccaacaagaaaaccaactgacccgtgtccaaattcaatgaagcatgggcaaccctggacagccacaatgtccaatgactctgcaaccgtcatcatttcccccgagtgccgagagggatctagtaatgaaactagacgcacgaatcaaagaactggaataaagtgtccaaagtccggaagataaatccgacccttccccgcctcaatgtcaagacaagtcgcaccattcgagacacaggggcccgcttcaagtccgttcaagccctgcccaggagtcctctgtctctcctagatctcctgcccatctcggtcgcagacaaagtctagctctaatagatccgacctccccgacaggcccattgcaaaataagacacagtctgaccgcgattccaagactgtgaaaagataacatagttccgaaagggccctgataccaaaaacctcagtccaatctaaccaacccatcggttccaagaagcggtccccaagtccttccaattgctaccctcaacgaagaagactggcgaccgcgaagcggttgaatcggataaactccttgatgaaatgcaagaggaaatcgacatgtactgggacagattgcgttttcaacgcatgcaagagaaacttctggcccggactctccaggcccagttgagggagcgccgagctctttgatatattctgaagaaagcgaaagctgagctcaaagacctggacacagctgatgtcaggtctatattgggtccacgaattccacgcactcaaattccagacttcatcaggaggaggatatggggggaacatgcgaggaagaatagagggggagacagatcctagtgtggattaggcgggtttggaccctgatcggcgcttttgcttcttcttttttctttggcttttaatatgactccgtgtttcttacattccggagaagctatcacgaagatcataccacaagttgttctttaattgaatttccaatacttgaactgctgagtgtgtggctagctcgtggagctagataaatagtaaaagcccctacagaaccaggtcatcttcacgttaaatcgagaaagaaaaaggtatgcacaatatgtacatctacagcctcggccccttcgaatgtcccgtatctatcccatcagaactcttccggtccgaaactaactcctgcaccccagtttcgcagtctaacactccgatctctggcagaagttcctgttctttgggctgattggcgatcgtttcttccttaccctcggtcctccggcctggtggaataaacacgttgtagtatcttgggaacaccaaaccgagcagaatcaagagcaaacagaagtgcgctaaaataaacccagcgatcaccattgggtcgtaacgtagggtataagattcaggatacgcgaagctgaacacaatggccagaataggcgcatagacataccggagtagaataggctagaaacgagggatattccagtttctattactactaacgatagtgtttaggtcacatctcaattgattatcctggatacgttagtttctcttagcgcgagcttgttagcagcgggaaatatacagagtagaatgctagatactaaaattgactaaggaaagggttctacccctagaagctagtagctctaatatccggggttataacgacgaggatagaaatagtcgagcagacgatatataacctaaacctagtactagcgctagctaccggattcgaggtactgtatatattgtaatatagcctattaggctgactctgcggaagatagaaatctatataagaaactagataaagacgctctagccgactgtctcactaataagatccttagattcgtgggttgcgagataggagagccgcgctaagagtcttggggggcatcccagagcggagatggtgtgcgatgtcgcagtcctgtaggcgggattactatcatgagcaaagattagccagcttggctcggtcatgtgaggtgacctgcaggtatctcatggtccacaacgagtggatgcagggttcggaggagtgccgaacgagctgaggtgtccgaaaaacagtcgaaattcccttcagttgccaaggggcctcctagattgcgcctagggtgatagtagaaacggataccttctgcttgcttctccgataagagttagattttaggtgcttacctattacgctggtttcataatatttttgatataggtgatataggtgattcagcggcgtgtggcaagactgatacactacctactctgtaccgctctatgttttagcttgatgttgagcagatacgtgcggaatttgtgacttctcgtccagagacctatagaatttcatccaggaaccaatggaatatactacatatcactaaacaaagctctggcttgggaagttgggcctctgaacttcgatactaaaatttcaacatcttgaaagtgagcgggacattaagtatataatgagacaacttctacttgggttcatcctgttaagcactctatgtcttagtgtaagattgggccgggccgtaaaataaggatgtaagtcgttcctcgagcttgagtgctggtggtgccggtaagttgttattaagattaagttcaaagaggaatgctggatagtcaaaagcttctcacgggctttcttattcgatggtggctcatggatgtcctaatcctgtcttgggttcatcatcactttctcgttgccctaacggtctaatgataattttaaattcattggacgcgaatcttcagcgcttgaacgctcatgaggatcgtgtggagatgggaggagaaggagtccaaggactatatagaagaaatgatatattttcataagagactgagatattatatatggagtatagaggtagatacaggattgctaaaatagatgatgggaaatgacgtcagcctcctcttatttttcactcgcccctcatttccatatgtttgtatattgtatgttattatcttcccatctcgcatttcttcttggataatgtatcgtgattctggctacccaatgccgacgtgggccagggatagatgacgttgtggaagggcgccagatttccgtcaagtttctatagtttgtccctctcttttcctcctcctatagtccatagtgaatataactgtgttccctccttctctcttcctgcagtagctttctcctccgctgacactttcccatatagtggagccatctagtacagtatgctcctcgctatatcgcttagacggttcgagcgtactctaaggtccttgaatttaaggtcccttatgaacgttacgtatattataaacctaaaccaagtttcgctgaagtattagaggatcacgtagtctaacctggtcagtaggaaattatgcacatttgcatagcttctgctttgtggtccaacgggcctttttgcctttttcttggttctcaattctattattgttctaccttctccatagtaatatacatattttacagtactgtccatgatatccataccgactctgtacctgctccttatgctaagctgaggaatgctaacaaaatattgtatgtggagttcagtagagtcagctctgcctcggagtatgtaccattgaatactggagcgggggttaatgtcccggcgttgattgcggaggagaataccacctggctgaggtcgtgaacggcgcttgttggaagggtattgccaataaagtatgcacggatggcctctgtcagccccaacgacgcaatgctgactgttgtatgacctgggcctcgtctggtcaccaaccgggacgcggtagcaagctgactctgcaaacgctctgcagaggccaacggagtcacggggtcatgttcgccattgacaatcagcaccggggtattttgctcagtgaggatggagtttgcatcgcggactttcgaggctcccaagttcgggattcttgcgcgggtgtccggaaagtggcgacagaaggataggggagtcacgtcagcattcagccaaggggtatcctcgcggagagagacattgagtactagggaagcaacgtccgccaaggagatgccactggacggcgcattatccacacactgcaggggccattcagctagagacccagtggctggagctttggaattggctggcggactggcggcagctgcattaagaatggacactattggagtcgcatctccttgctcaagagcgctcacaactgaggagataaggggccaagtagtcggaactcgggaaaaggaccacatgaatgcgctgaagatcccaacggtgatggagaacccttgagagaccggaatgggatgttcgtagagggaatcttgtaaattagcaagtcgagtggtcaggtcggcagttacatttgcaggaggagtactcagagcacagccagctggaccagcttgttcgcaaaatgacaccagatcgttgatagcatctcgcacggagagttggtcattgggaagctgggcgacataggtctcagcattggcagtagcatcaaaaacgccgtccaggacaatcctcccgaccctctccggataggtctgaataaattctaccccaaaaatggtcccgtaggagagaccccagtaattcaaacgggcatctttgccgtccaatgcatcgacaatagcccccatgtcacgaacaacgtaggccgcgctagaagtatacgaagctgtcgaattgtaagatgcacatgcggcagcaagctgggcggtcatgctgtcaaactcctgcatcgcagcgttgtaaaagggcgtgtaggattggtttctgaactggccgtacgccacgtcaggcgcagctggaagcacctgggacgcttcatactcttctccggcggtagcaaaacattgcaagacgggttgagcggaacccacaccgcgcgggtcccatccaattatatcgtaaaaccccccggtgatgttcgatattccttccccggcgccgttcacgacgaaggagacaccagacgcaccaggacccccaggattcgtgagaagtgagcctttgcgctgggatacctctaccgtggcgttgtatcgggcaagcggaatagaagctgacatcccgctctgtggctccgcatactcaagcggcactcggagggttgagcaatccaacgctggatttgcaggacagggtgaccattgaaggctggcaagagccgtagatgccgacaggcatccagcaagaaggaagtacttaacagaagagagagaggacatcttgtcttgtgttcatggctcgcatgtgaattatgacagaaatctggcggtacaacaatatatgagtaccctcaagtggtattgaactctaattgacgaaactgacaaatctctaattttaatatgcaccgcgagccgacaaaataagcatcttcaacacgttatcagcaaaatacagtaactaaactctatggcgaaagcagaaggtcaacggacgtaataaattaccatttatgaaaagggcaggttagtgcctttctggccatttattggataagttccgagcgatttccaccacgcccatttgcagtctgatccttcactcgccccgatactccttcgataatatacaccatacaagaaaatattgtcaaagtagagaacaatgtaaaagagcgcactctaacagtacacggcacggttgaaactggccagcggcgaaagggcagttataactcatggttactcgtcacgatcggccttagtcaagagatgtgaaggccgatcccaacaatatttcggccagactgagacattggagtctccggactgttctttgtccctgctgtaggaaagtgggcgcgggttggatggtgagtgtggcggagtggagtggagccgatttcttgcagtctggtttggagtagggtagtagatagtattaccctctttttcctatctatcttaatatttacgtataaagctatataatatagtatatataagatactcctagagtgattttgggatattctatttagagaacatattataagtagtaaagaaattcaaataaaatcataatagagtgagaaaagagccttagaggttatattatatatttttcttagggccggtataggcttggaataagttagcccttattaccctaagggtgagaattgtcaccctattcttacctctctcacccatatcacctatgctcaccctagagtgccgcttaggtactagggccaaattgagtattgactatgtagaataatgagcttaagtacggctgagcggacgggaagccctgttttccacaccctatggtcgtatgtaccgaaatgtatatcggaataggatatgtagtacggcaggttttagatgtcatcgactaattcttcaccgcaataataattcatatataggccaagcatatgcctacccgcccggataataagatatttctgattcttaaaccaagctgcttatacacacaagcacttccaagacctccgatatccgcggtttggaaaccaccaaagaaaaatcatacttactgtgaagacagcaagtgtggatgtggtgaatgaacacacccgtgagaatctgaagcagaagccggcaagagccatcggcgaaatccctttctcttttgcgcatcacactttagctgttccacgtcagtgtattgacaggtccagcatttgtgtatgatttctcgggaaggaacctggaagaccgtcaaggcttggaaattggccaacagaatatattcgcacgatttattggtagtcactatcgccgatttcgtcatatgggcgcagtccagttgtgatcttgaatatcagacaacctagcgcaaagatatctgtcgcggtagaccgaggagagtcaggagctattcgataccgatcttcctctgagacaagagtgtcttgtcctccaactccaattgctgagccaaagaagtcgcagagttttatggacaagtcagcgacgagaaagttccgtgtactgatatcaacatggactgcggcaatgcaatcattgttaatttgactaaacccaattaggaatagatgatcttggctcaggtgggtacccgtccgtggatctaccacggcgccgtgatcggtgatgagctaatccgtgtagttagcatccttcatctctactagccaagatatcaatccaatgcacgtgtcttcggcaaaaattccttttccaaggttggagtttatatggctcaagcacttcaatcttggctggcggtatatcttttacacactactcgacacctactaaatttgttcgaatgaatgtgataactggcatcgagtgacacagatactctagatcaccattggagagtggaacaagcagacaatcgagttgtgtgattaattcaataagctaggctataaggtaacatctttgcgtcgtttcccaaaaaggaaaataattcgccctcgcggagggatcccgacggggccatgctaagcttcacgcactgacccccgaaggtggctaattagacgattatggcgtaataacatagtacgatggtcgcagctgaaacacacgctaagctcaaggagtctccacagttctaagagtgcttggtctataactatttccccttaaaatagtgtgattctctgaaagataggatcagctcgagattgttatacttacaaactgcaaatcgagaatctgccccgtttcctatgggtatcacatacaacttggaccgaaaacagggactttatcaaagtataatcagatacgtcttctccgggcgcgatgatgccatttcggccccatgccgacgaagagaatataacctggaagtcaagaactatgaatttcagttatctgaaaagatgagtacaatatcccctagcccgaaaaatgccaccagcacagtggctcccgtcgtcgagacccacctgaaagaggagagatctctagtaagtatcatgacctctaacgcatggacttatagactaacggctgcaggtatggcgtctggatctgtttttcttgaccattggttttctaggctatgcattcaaatatctggaccagacgaatattgtgagtacgttcgcaatctggaaaagaacacactctgactgactatctgataagagtaatgcctatgtctcgggaatgcagacagacttgaagctatatggcaatgagctgaactactttacaacctttttcaagtaagttgttcattgtttgatagtgatgtccctgctgatccgcaatagcatcgggtatatggttatgctgtatccctcatgcatcataatctcccacatcggtccgtcagtctggctacctgcctgcgaagtaagttgaataaatccaaggcttatatggatgggattgaatatactgacaacagataggtgatttggggtgttttgacttgctgtttatccactgccactagtgcaaagcaggtaaatacattcaaacccctcgataatatcttccccaactcatagaatcctaggtatacggtcttcgattcctaatcggctttttcgaaggtgccacttggccaggttattttactatcatcaggtgaaacgcacagctgctctgccaccaatatatatactgaccttgtccagccaatggtatctccccgaagaaatggctcttcgcatgagtctgtataatattgcccaaccggtcggagccatgttatctggtgcgatgcaaggtgctctttcaacgaacctcgagggtgctcttggtcggagcggttggcggtgggcgtttatcatcaatgtaagatatttggtatctacaatggggaacacgtcctaatcttctagggtgtctgcactatttttattgcattagttgcatttgttctcttgccaggatttgtatgaacctgtctactcctctagcttccttgcagcatgctaacagaccctatctagcccgatcgccccaatccgcttgccaagatatacctcaggcctcgagatatcagtatgtatactattctggaatcacattattagaaatacatctgctaatatagcaatgaagtcgtcgccaaagagcgaacccgtcggatcaaccgcagtccccaggtgggaatcactgtcaaatcattcctgcgcagcttcaaattctggcatgtctggttatttgcaagtgagtcgactatatctattcttttcttttccaagctagatcattctgacactttatagtttcctggtccattggcacgggaactacacctgcaaattacttcaacctctggctcaagtccttgaaaaaccccgacggaacgaagaaatagtaagaatcagccctcctctttctggcgacaaacctgacagtgtcttcagctcggtcgctatgcttaactacctgccgatcgcgggccaggctatacaactggttgctgagcttttgttcagcggcttcagtgattatctgggaaccagattaccatttttgcttcttcactcggtgagtatatctggcgagcagagtagagcggcacctatgatactaatttatattttctaggtcataaatatcacatctcttattatcttgatcatacggcctgcaaatgaacatgcgtacatggtcggttggtatatgaattacatcggagcgtgagtgctcccattctactcaaaatttgcaaaggttttttctctgactgaaatagtgtgtcgactatgctactttgtgcatgggcatcttcctatctagagaaagaaccacaagcccgaacagtccttttcgccactggaactctcttctcatacctgttcagtgccttcttgcccattgcggcgtacccggcttcggaagcaccccattggagaattggtgcaaagctctatcttggtctctcttgcttggctactgcactcttcgttgtcatccatttgattctcagacatgaggcaaaacgagataagagaaacgagacggctgaatctaggtccgaagaatcactgtaatgggagtctatccgtgaaggggatgcgatatcgataggtagagcggctgtgatgcatatatattacgtgactacaatacgaaggagaaccgatcaatagaatatatgaatgatagccgattataatctaactgctgccatacaactctctctagttatagctactagacgatcacgcacaggttatgagatcgcgaaaccaggaccgaaaatacaccagtaactatttggtggctcctcgcacacgtatcacgtatatgggcgacgaatcgtgccactacgacaatgggactttttggctcaccgctctaatcaccgccttagtaattatggttttaggacggttccatggatatctcctttggtaaacactgctggcatatggtatataaaatcgaaataaagcaattgagagatgaaaaactaagagatcacctgttctaccataaagctattcagagatcacctgatttatcattataaagattcgagagattacatgatctattacggagtatcatgaagctattcggagatcacttaatctatcactatggagcaattgaaattaattctactaccactaataatagagataattaaatcccaaaaacggcattttaatactagatactacttactatctaattaattaaatacaaccggtattttacgctattcatggttcaattgtacgaagaagtgatttaattttgacgatatagatcagatgctacggagtacagagtagtccaagaaggtaaaaataaaatgttgtgcgcaaatggtaaggtattatataatcagatcacgtgcgttgccgactaataatactggcagaaataacaagatatacaatatagtcgtaagagttgggggaggggcccttttataccccaaaaccacgtgccttcctaaaatgcgacagttccctcgagccttctttgtcaatgtcaatgtcaatgtcacatgcattgcaccttctttgtttgccttctttgtttacacggggaactttcaatgtttgggaaggaacgacattggcttcagggcatcaagtgcaattgaagtccgatattagatcgcttagggaatgggaagattggaaaattcagtccaagcctaaaatatcttccaaaaagatcaaagatcgtgctgaaattgttgaaatctgtaccagctggatcgatgagtggcgtcaccgtcacccccaacacaagaaccctcccattgctgctcactatttcctcttgctcatctttatcatcacgatgatcgcatggtatagataattacctctctatatgtataattgtagtatccctaggtagcagctctatgaatttctttattgccagcgatgtactcgcttttttcaaactcaacctgctatgaggatcatatactatactaatacatctttcagtacatacgaccatagggtgtggaaaacagggcttcccgtccgctcagccgtacttaagcnnnnnnnnnnnnnnnnnnnnnnnnnnnnnnnnnnnnnnnnnnnnnnnnnnnnnnnnnnnnnnnnnnnnnnnnnnnnnnnnnnnnnnnnnnnnnnnnnnnnnnnnnnnnnnnnnnnnnnnnnnnnnnnnnnnnnnnnnnnnnnnnnnnnnnnnnnnnnnnnnnnnnnncgccggtgagttagtagttgggtgggtgaccaccagcgaatcctcactgttgtatgtttttgtcttgttttttatttactcaaacttttgatggctcaatccacaggtcgctaacttcaaccacgagagtgttggatatgccaacgaaatccactctagcgtctagagtacctccaaacaagcaattcccatggttcgccccacatggtcactttaaccctttactcgggcctggatcatcttccctctcgtcttcatctcaacttgctgatgacttccaggaagaaagcgaggcttacgagacttacgatacccccgcatatctccagaagattgtcgatgatattcgtaacctggaaatcgtgtatttcaccggtcgggatagtgagtcgattccgttttctgggtggtatgagtagatctatatattaagttcaaacctcgaaccttcgcgcttagcgatctagcaaacaatctatctaatgaagtaaacaatgcaaacagcagatagttgctgatccgtagagtcatagaacagacaatcatgcagacggtaataaatgtcacgatctactatagatcgctatcacatgcttcatgtttgcttgcttgctcgtttgcttgcttccatagattgtttgttaaatagctaagcgaggtttgcaacgtttgcaaagtggttagcagctatataacaaggttgtttcccattatccacttacttactcttcctctccatcttcggtatttcgttgaatacactctttctcttctgatcgacttggcgcttcgcagtccacactttgataggtcagggcgtcaactggccctgcctggtcttggcgctttggtcgctcggcaactcatctcatcacattccccccccagttatcctcatctaaacccactcctattcatcatccattttcaaatccctcatcttacgaaatatgtcttcaaaaattcaagtcgtggaaacacgtgaacgtcaactcgagcgctgggttctgatgaaaatcgagcatgcaattgagaaacttgaggagcataaactcaacgcgacagaactcgagaaatggaaaattagcttctccagtatgagtctcgatcagaactcagagcttaagccccgcttcttcgcaccgaaacctgacctcccgccaccaaacgatgagatactcgataaggccgctgagcctaatgatagtgatggacgctattatttaggtgcatacgatatgaacaatttcttaagctcttatgccttccaccaactaggcctccgtgataacgggccgtggcatttgatagagtaagtctattgctgtctggagctatatcgggccatcaagggttgggtatttgtcatttcctgtagaagcaggctgtgagcttcatggactattatctaacgctagtcgatagccctggtcaatataacgcttacaagagcctttatttccatgggtctccctcgcttggcccgtctcctacatttggcgcttttaagataatagatagtcccggaaaggaatatccgcatcttaaagcagtcatatataccgatatggaggcggatgacaaaacttgtttccgttcagaggtcttgatcagccttcgcctaatgttggcccaattgagaaaggtgcgcctgatgcaccataagatcgcaccggtaattatcgattcttccctttctcctattcctttattctatgcttctggggttactaactaagtattctataggtcttactcgtctcgttgatgggaaagcatgtacgtatactagagtcctattttgatggcaaattgcttcaaatgcgctctactcgtctttacaaaatctccgactgggactcgattaagactgtgtacatgattctcaccgagtatttgctcggccctccaatcagagataccatctaggctggggtatcttcttctattcgggttggcatgttgaaatgattgaatgaacatcaagtgacttgaggagatgtccgacggcccagccggggatccacatgcgcaatgaacagataaaactcccatttcccccagaaaagatagatattcaagcaatacacacatcatgaaacaaccaatctcattgttcccatactcagtaatctaaacatcaacgtggcataggaggcttcagggaatgcactcttcagttcaaactcggagcctgccatagcccgaagaggctacgacagagacaaaaatctttcaatctcaagcttcttttggggcgtcatatatataacagacttttgcctttggccatgatggataggggatcgcgtttccagataaggctcaggtgcagccacagaggactcaggccctccttaagcctacttcttgcgctgataggccaaataattctagtgatgatgattccccaaattcacccggaccagtcgcctcatccaaggcaaatggagatctgtcagggtcgggactcctaggaagatgcctgactaagccaagttttgcagcgccattatcaagagcaaatatatgagtgagaaatggattccatactaagaagtacagattttgcaagataaaataactctaatatgtcaaaagagccgtgtgccttctttctgtatgtacaacatatattgcagggagtgtggccacgtgattacagcattattgttttgggtctggtggggcggtgtaggcttgtttactttgcgttaaaagtggatacaaaccccaccttaccccacctgggctatatatcgtatcagccgactgcaaagaacctcatttcacaacgctaggccagtggagttgctgttgaagggtgctccagtagtattgagatggtatcttgggagtgtcacgctgcggtcataagttatataatagggatatggttgagaatggcggccagagtattatttgattgatcacgtgcacctggttggtctgtaaataaaacgagcgcaccttactcttcacgtacatacccctacatttgagatttcccatattatatctctgccatcatggaatacgataggcgtcttgaccttctgcatgaggtagaagaaaacatctggcttgacaaagttgtaaaggcccgctctgtggagcttctgcacttgggtttcaactttgcacccacagcaactcggtggccttcctcgtgtcaacagtctctctggcagatatgcagacgaaaaggttgccatggaggttgaggctctccatcttatctgccagatagacactgattgtgattgagagtgcatgagaagtttcagaaatgcatcatcagcggctggctacacgagcctatcatctcaagggaaacccgaatgttcatcaaggattgatgcacgtcaaggcacaggccaagatggccagcactatagggcccattacttctccaagggcgcgaagaaagcgttaaaataatcaatgttattcgttgagaggtgtgctgattatgcactggccgccatgacaaaaatcctcggcggttagagaagttggatagatcaccaacaaaaatatgattcgatctcatgaaatgaaggatgaaagattaaacttcaagcatgccaactctggaagcacagtggtatagtggtcacagatgaggttggttggcccacccgggcgtatcgcagtggtcatgtgcgaaggggcagagcggccaaaggtcaaacgcctggtgatcgcactcagactaggggcgccaatatgagcattgaccatgggaccaacgtgagaggtcaggagggcccccctgatctgatttctgaatccgtagggttgatgcctaaatgtgcctgaattatgccttattttaaactgtatattataccacctggggcatgacagagggcttaataagcaaagtatctttccaaggttccaatccaaggttgaaaaaatgaggctattcccaccatacaattatccgcatacacccatttattcataggcgctaaagctattgcgactgtacaaatgatttgtggggtggaaatagcttcaattcaatggtttatgcggtcggggacgggtttcaacgccgggattcgaaaaacctgatgatttttggggtcgaaatacgtagcttaaattttgggaagttggagatttgtaggaatagcttcaacttacaatacacggtatagagccgtgtcgaaagcggtctatagtacaggcatattcaggcatattcaggcatcaaccctgcaaaatcagccaggcattcgacctttggtcgctctgccccttcgcagtcatgtgatgggaggctggtgctatccgaacgcgacttcgtgtgaacttcgcttccttaacaagatgtacgcacgcagagcttgcgagggctttcgatataggtctcgcgtactcccttcttctagagtcggacaagctgtcttgacttgtattccatttcagaatactgtcgatatggaatggttacgacgtttgatctcgcgccagacgcacacgtcctcgacgcctgtttccccccggtcgcctactaatcctaccataagactgcgatgaggagagtatgtatcactacacgtccggtcgatggctttggaatgagaaagaacagttgtcccgtcgctatgtcaagttcaatctggcagagctcgtcaagatcgcaacccgcgcgacagggtcaaagtcctgcgtcgaagtgcagaaactcccagaaggaaatttcagcaaagttttcctactcacgatggaggatgggaaggaagtgattgcaaagctcccgaatcctaatgctggaccgcagtactttaccacagctagtgaggtggcgaccatggactacgtgaggaacactttgttttatttcgcgacgtgctattttatctgaccccgatttctaggtccggaatgttctgaatattccagccccaacggtgtatgcttggagccttcctaccgaagagattggagccgagtatagcattatggagaaaagccgtggggttgcacttggcaaggtgtgggatgatctgccgggtcctgataaacttaagattgttcatcgactcgctgggtttgagaaggctctcgtatccacccggtttccgatgtatggaagcatatattatgcagacaacctacgcaatatcgacccagatcaggtgattgagcttggagataagaagaacaccgtgagtgtgaaatttgcggttgatccaaccacgaatcgaacgttctttgatgatggcagaaattctgttaatgtccagcgaggaccctgttagtgtctccctcggatcgctggcgaactgtcctaatggatgttttacgataggggcatctcttgaagattatgctttcgctcgtgccaaccgtgaacttgcttgtctgcagaccttctcgaaattcccacgtccacaaggattattttatgggccaggtcaataccagcccaccgctcaacgaaagcaagaaacactgcaaaatttcctcaagattgccaagtttctgtcgccgaaagacaaagagatatctaagcctgttctgtggcaccccgatctacacggagacaacattttcgtgaacccggatcagccaacagagattatttctattatcgattggcaggccgtgaatttgtcgcctctatttcttcaggctcgccatccagccctgatagaattcgaggggcccatccctgagggattgaaggcaatcagtctgcccgacaatttcaatgaactcagtccagaagaacagctcgaggcgaagaagcttcgtgctgcccagtctctctacaaacattatgatattcagatgatcgaggactgccctgagattgcagctgctctaaagttcaaaaattcgctcgctggccaaatcatgggtctttctggctctctcttcagcgatggggaacccattgttcagggtatgctcataagactccaggaagaatgggggtctcgtgttgggtcatccattccctgtccactctctttcaccgaggaggataaggaacatcaaaaggaggacgagacaaagtgggctagtggtgttgaactaatggaggaattcctcggtcaagtcggtgcattgggacggttgggtgaatcacaatagctacgagcacttcaaggcgcggctagaagaatgccaggaagagttctggaactctcactccaccacaagtgaagagagaaatgagtggaaatcagtatggccttttacagacggccaatgattttcataggtgggtaggtatatagcttaaataggtttgttcaacgccgtcggtgactttctagttacctagcacttcatggatcttaggtagatgatatacttgatcaccgaaacattcgttcatatgcgacactgtcacaatgggctttttgagctacaagacatgcgcatgtgtatgggtccgtgagacaaacccaagctacaccttccaaagttaattccaaggttagttttctcacggtgggcgtttagttcttagctaatcagccttttcgatgggagtccatctgataagcgaggacttccatatcggacggatggcggaacggaacaaatggcgactttacgacgtcattacctgcctccatactatagaaaaactgtccaaaggctgcaagtatacgtgtgccacagctatatcattatctgagacccggtctccgattatgccattagcggtgcggcgtgaccggcaaaatccatagcagattatgatctagcgcgctggcacagactctgtacatagaagttgccctccagggctatgtggattgatgatgtcatttttgccttagtcaactatgacctacggggtaactaactatgtatggagtatctaggtactgaagaggggacccctgaggggtaccgacagccctgcctgcgaaacaggtgtgagagcagagtcgtcactgggagtaatagggtgctagagaggagaacaccatgaggtgactactgagaatggaagtggaaaggtgtctgcggtgctatctagttatgcctcgggagtgcttttatgtcacatagccgcttagtcatcctgctctggaaacccccactgcagtacctaggtacgcttgtaccttacacagattgccgtggctccaaggttataaggttataagtgatggtcacttgagattcccaattcaactgaactcgtgtaggtctgtgcatcagttatgaattcggtttatgtccgaagatctcccgaatataggtattccttgattggctatggaggtatggtatgtaatgtaggtcccggtgtacataggtgtgtgtccactgtcccctccgttcctaacttcatcttattctaccctcggaaccagcagggatgacttcatatgtagctttcgtgtgggtttcccccgggtctttaagtggtaatcaggactcctatccacagatatgggcaacggctgtatgtagttctgacgtcaggtcgtgtggagaatgccaagaatggcagggacctctggatcgcagatcgaaattgacagggtacttttattgtacttcttttagggatattcacacggatattgagcaagaataacatgagactttaaattgtatatatataaaaaaaaagaaaggttctacaccttcaatctcatcgatatcagccctaaatctcgatctatactgtgttatacgccacggccgccaccactctgtggtgtagatccactataaatccggtttcagcccgtggagtccccattaacacatacttggtacatacttcctacatataacacctggagaaggtccacaatcttttttttttctccttccccctttgctccctcccccgcactcaaggatgtctaccccagggcaacgagagcctcaggctgttcaccatgagaacaccgacagtgaagccagcgtgcctgtcgatgtgtccgccgcaattgaaaaaaaagagagcgagcgttccgatggaaagcgcgagctgaaggaagatgagtgctacgagattctgggatactgctggccacgatggaagaaatggacctatctagccgcggtcgcgtgcgttcaggtctctatgaacttcaacacttcggtctaccctgctgctgtcaagggtcttgccgaggcttttcacattagcgagcaacatgctcgcacgggccaaatggcttacctggttacttattctattggctgtgagctgtgggctccttggtccgaggaattcggtcgctggcctatcctccagctctctatgttcttgatcaacatttggcaactacctgcagcccttgcccccaattggggcagtgttgttgtcgctcgtgcattggttggttttcttccttgctaagctagcagtttaacaatttgatgaactaacatgatatttagggtggtctctctactgctggtggtagtgtcacactcggtcttattgccgatatctatgaacccgagacgcaacaatttcctctggctttcatcgttctgtcctcttgtattggtaccagtattggtggtgtgattggaggaccaattgcccgttgtaagcagccactactctcactctgcaacattttacaacctagctaacacgtttgacacttagtccttgattggcaatggttcttctggattcaactcatcttcgggggattcacccaacttatcatcttcttcatgcctgagagtcgttcgaccattatcatggacagagaagccaagcgtcgccgcaagaccggggaagacccaaatatttacggacccaacgagctcaagaccccccgtgtctccctcaaggaagccggcaagatttgggcacgtccattctacatgtttctgcgcgagcccatcgtgctttgcctatctcttctgtccggtttctccgatgctctgatcttcactttcctggagagcttcgccatcgtctacgagcaaggatggggcttcggtaccctcgcacaagcgtgggcaattattccaatcaacgcagcctacttcatcgcctactttagctacttcccgtggttcattcgtgaccaaaagctccggcttagacatggcgatgccgccatcccacccgagcgccgtctcaagtggctgctcttcctcgccccactcgaacctattggtctattcggttttgcctggacatccttcggcgactcaagaaacgttcattggatcggatccatgatattctccgcctgtgtcggtatcgccaactatgccatctacctctcgtctgttgattatatggtcgcttcctatggtgtgtattcagcttctgcgaccggtggtaacgctttcgcgcgtgatcttctcgctggtgtctcggccatgtacgcgacgcctatgtacaaaaatatcggcaataagtggcatgtggagtatgcaagtactattctggcttgtctttcctgtctcgttgtgactcccatctatgttttctactggaagggaccgcagcttcgcgccaagagtaagttcgcctctacgcttgctgccgacagagagcacaaccatggtaggcgtgtcagcaggatcagtgtggagcctgagtattgagctttgatcaaacgtgcagttgcattattagaagttttgcatagatatcttgcttttcatgcgttatgtatatatgactcgccttgggcgatcagagaattttagacctcatgacaattagagctagacccgaaacaattttatttcaacatactactccgtacatatttttagactcagctttcattcacatttaagggggaacgtatgatgaacaacatgcgataagacgcaatgaccaaaaggagcgttgagcagtttgggtggggaagtacacgatggatgcagcaaggatacagtggggtccgctattgccttccacggcggaggtagatgcgatgctctttcaaaccctaatcacatgatctgacaagctgaatgatatcacagcgtacagataccgttctgaaattacactataacaataccgagcctttacctgatacctgtatgaaagttactcaagtctcgaactgaggggcttggcagactggaatgttcgatgcaaatagagcaaacttgggtcgcacaccctcctatcctctcctagccctacccgggattgtaccacagatcgactacagtcaagtcaggtaaatttccttccctttgagtaggagaaaggcgatgaatacgatgggtatcctcattatgtttgctacactatcgcctggaaactggtactcaaccgcaaaacggtgggtaaagtgaccgaagacgacttggtcgtagcccccagtgagtactaggacggaacgttgaaggcaaatgttaaggacatattgcaaatgaaaaagaagcgaagccaacgcgttcgctctgaaggcacacctgtcaccgtgtcaacgacaaaatgttgaaggatttgagaaattctatagttctactaacattgattggaagccagtggagaaacagctacgtaagttacgtaagtagagcaatgtcctccgtatgggtaaaaagattagagttctcattaccttcaactacggccacgatgataacgatcaggcgagaccatcatcacggagagtcaagaagagaggccgcgtgtcggcaattagtcggatgctggctgagcataaagcacatattgatacggaagaagaggccaccggacggccttcaacctggagtctcgtgtatgatcgtatgcgatgtgtcattcgctcatatccactcatgtctgattggtgctgggaggatccaaaggacaagaaacattataagcttagggccccgtaccttgaacgactcattaatcatgttgacgaaggtggtagtctaaatgaccatgatgatgtccctagtgatatccgtcgagacctcattttagaaagccagacaggaaaaaaacccccaaaagggtagcgaagtgaccactggattgtcatattccccgatcagtatcaatgttctcctagcataagctgcgcatacttcgacaggcgctttattaccttccagaccagtctctcatgagagtcttatgatacctgaaactcgagagcaggctatgaggtaatactgtaattggctggaatcacgcgccaatgacgaagattacaaagctgatttccgaaaaacatgccaggtaactttggaaaatcgcctagaccttgaattgatcctcgacgaccctgatgctggcttcttcgttcagcgaggaattcaaattagaactgctcgtcgttttttgcgcgacatcaacgaattgcaccgaaacattacacatgaaccgacctctggcgagattcttgatgttgcagggtagagccaatagctgttatgttttgttatcctatgcggctagctccacataggattgactaacagcatgttatttctttgggttaaggcgtaacgtgtattgcatttggttcataatagctcacatttacatcattgccctgcaagattattatatacaggacgtcccgttcctggtgtcaccacctacactcttccattgatactaccaattgaggcacttttgatgacattagctcaatgcacaaaagtgagtggtgctgctcgtcgctgggttatatcatgccatctgtaatgattctatgcaagcttaatagaatgggcaattcaatagcaggggcagagataaagtctttgcatttgcacaacagcacaggaaaacccgaataagggaaaacctatgccaagggagataaaaaagaacagcagacattgaagcaatagaggataaagcttggtagacaaaactcgctatcaaatagacgtcggtacggtaactgccatgatatcatataccgcatttatcttggtcaagtctttcagagccactgctttgcagcctgaagatccaatagctcccactggagatcagatcttagttaacactgtattacagtgaggatacccccagccaaggtagatagatcacttacatcgtaatcccaggcaatcaccaagggttggcaaataacaagaaggttaatcgaggtcctgatgtatatgttaacataccattggaggatagtctggaacacagtcttctcttaccctctccagcattggtgagttctttcaagtcactttcttagcgaatttgacgacaacacttctcccccacttccagagggattcatcttccagacatttcttcgcaattttgcaatttgcttcgttcccatacttgtctgccatgtccatgttgctcataataaagcccatcgctttatcgatcgcacaagacttcattctctcaagttcaggtttcttgcagaagtttgtccttttctccgccgcacattgagccacaatcgcatccgctaacggctttattttcgctctgtagtttggtaatttcaaccccttcttttgcaatttgtcccatagaggtatgagtacctgcttctccagaaatggccagtcatctgctccaggactcttgcccttggaacagacaagcttatcgaagcttggccatatttctgtctccaccttggcgccaacccccttcatagtattcatgcatatctcgtgcgggagaccgatactgattgagaagccagagaatataagaagaaaaaaggaaacaaatctccactgcattatgatggttggtatgggttttggatttgaaagtaacagatgcggattgttgatatgtctgatgatgggagatcagggctttatagcaaggctttctttactacgtagagcattcaagcgcgtgagccactactggtcaattgagatgggatctacgacgtaacacaataaagaagatcccttgcagtcacaatattgtgattcaatggtagaacgctgtatgtggggaatgcgataagcctgccaggactgctcctctgcgctttgattggacctcggcgtgtgatcgggcagccgatcttatttgtagatgctcagtcaccgagaagtagcgcagggcttgcgataactagttcaccctgtcctttgtaacttcgtgatccgatcggcaggactattgatttgaacaagtagaaaagcccatccaatgaagggtctcagacagcgagcgggcgatcttgccagatcgccagatctacatggtgattccgggtggttctatgtaatattaatctactataacgatgactcacttacgacagtatacaatcatttacataaacggttctaccagaagtataagatggtgagctaaaagggagtagcgttgttcgacttattttccaggaattgagtgcgaatagtgtgaagattcaactgatttcgaagactactgtaccaagagatacttatttcagatgaactcagtagtggcgaaccctatagttagttaactatgctgcagtttccttatgagtaatacagcagggcgatcttcaagctattggcagagtgctggaccacataagtgactagggagttattacgagagatttggattcttggaaagattcaacttctgcctttctccacccactattgattttctctagcgctgcaaccaggggcaagacattgaactcaactatcacatccaggcttggcgggtcgacttggcgcagaatacccctgacatgtgtcaatgtcgcattgaattctagtttataaaaatgttaggactacctactagcgtaccctgaaatggaggtatcgaactagagtggaggttcccaagatggctcatgcaattcattagactaattgctaaggttctaatcccatgtgcgcggtgtgtgaataccccggcgcttacttagcgagtacgtcgagccatacgggccagttgtgcaggtgaccctcggggtcgtaacaaaaaagaagccaatggtcgacaaccaaatgtgacagaatgggaaggggaatctgtcgagcgacagagagattctggccatatgaacagaaatgatcaacgaaaccttggcgggctcagaaatgaatgatgaagtgtattggtcgagccgatttcgagaatgactataagtaaggcaaatcactcatgctcttctaccgttatacctgcatgccagaaatggcctccagcgctttcattcttcgcaccaacatcctgaacgcaccgccgaaggaaagcgtgaaacccccgatcgcagtcttcttcatatgttgaccaatatttcttgatatgcgccttaagttcggcaaagaattcctcgatggggttaaaatctggtgtcaagtccagtggagaccaacccgtccgcctataacccacccgtttatcgcacccagactcattaacgaaaactagatgaaacgaacgcaactttgacagtttgtgctgataaaaatctcgtaactgtggatttcgttcgcttgctctctgctatgctttctttttcgaccacccagcccggtatagtgctcgtttaatgctggatatcgaaggtatcacgttgaactcgtcgaatacgaagatagccatctcctcaacatagagaccgggtttttctgcgaggtggtcaaccagggcatctaccattacttatgtgatactcgatgggcggctgggagcaattgggggagacctggcactgccgaataaccgcatgttctttcggatgttagtaacagaacgctcgctgcatttggctacctggccatttgtgatgtggtatgtctctttttactgcataacatgtgaacaataatgtcacgctgccaggaatcgatatttcgcgccatctagattgggaggatggatgatatactgggaggggggaactcgagggagaggactgcgtgaagggaactatttttggagctgtaattaaacacgaatatacaacccactcctgttttatacgagtttggtattataccttcgatatcggaacattgttacaagtgttttggctaaccaaaataggagtaagtatcatgtgattagggttgcaaaaggcatctcatatacatccgtcatggaaggcaataacggacggcattgtatgcaatcttctatatccacgcacttctatcatattgacaccatttatttgtatcccctttctcgcgcatccaacactccctaaccacaccaccgacaaaatgatcacaagcacaattgaaatagccgcgccgcctgccaaagtgcgcgagattgtacgtagcattcccaaaggccgaattctaattccttgctcgacaagctgaccagttgtcgcgcccgcagctcctcaacttctcagcatacccggaatggcatacggaatggctcaaggggatcaccctcaaggacagcaccaagaccccgcaagaactttcctcaggagacaaaatcgaagtcaacatcgagaacttcaagttcgtcgctgaagtcaaggtgagaacaacaaacttccccaaagaaaggaaaggaagctgaagactctcaacgctcaaggagaacaccgagagcttgttttcttggcaaggcccgcccgtgtttacaattgctggtttgcataaattccatatcgagccggccaatgatggagcttcgactgttttcacgcagtctgaggatctcaagggtctccttgcattcattatgagtccgtctctgcttgggaagaaaatgcgcgcccatttcgatatcttccacagggatctgaaggcccgcgctgaatcggcataatttaggggggctggatttgttgcacacgcacaatctgccgttttatgcacgcactttcggtttgggtttgggtttgggtttgggttttgtgttatcagcgccttacctccactacattcctatgcacgacgtatacacacttgcaggcaaggtattggctcgggagatgtatatcctggtcaccgtttcaccgtctttcagggatggtagacttggaagcttaatgaaataaggataaatgaatgacttctgcgcaaaaatgaaaaacacgccttgtcagttcatctggcctgcccaatgacggcagaataagcggtctcatattaaattcgctatattgtagcaatggtctcgccgacaatggcgcgatggacttgaccggtcgtcagaccgtggtacagttgtggcacaccttggattgcagcctagggaaaccggttacacctcacacctgtggccctgggctataccgagagacgtatagcaatgtgtcacttcctcgagtatgtagaagactgacagaccgagggctgagtgaatgcccacttggcagaccaattaagctgtgtttggattgtgatgctcattatgacagtgttgccaatgaaccttttttcggtgatccaggctttttcacacaagccatgctctgcccatagaaaatgttgaataaaactgtatctcatataaactcaacgctactgctgtatggcgagaccgacattgagaggtctgataaaaccgattgatccatgagattgaagacagtgtcccaatgagaccgaaagaggtctgcactctgcggtttctctaaccacaaaacattttggatgtggacaagggtgtcactaaagttgctcagttgtagagcagcagctatatctcgtgccctgtccatgaaccaccgatgatgagtcgtgccagctgaagccaccatcccgaccgcggcaaaccagacatcaagtgagtcaaatacacgacgcgttgacgccagatgctcgaggtgctccataaatcggatgacaatcgtattcagtatgactgcatgcgagtaatatgttggtccctgagcaatgaacatgtagattatgattccgtagcgaatggattccgtcatcggtgatggcggcggtcttgttgtaacctgggcagatagtaggagtcggtgtatgacaaaacaggtgaggtcgtgaagttgtgtggatgggaaaggtatattgcgcgctcgccggaagatgttgcgtagacgacggaagacattctcaacggcatagtctacttcgatggtattgagatcaaatatttgatcgtcaagcgcggtcgagtcgaactgccattctgcaataggggggatgccatctccgatgccgaagtcatcttgtgtctcgaattgaggatgacccatgatgagcattgataccctttgcaacatgtgaatagcgattctatgggtggcaaggagttggcttaccagctaatcattctcgcggtaagcgggcttgtctgccttactgcgttgatgccgcctctcatatcgaccagctttttcaacccattaacatgcatttcgccaacttttatattgcctttgccgaactaagagccacataatcagggatttgttcgaattctaacacagtagcaaaccagggtgctgtagtgtctcacctcgatggttgccaaggtgatgactgagttcatagtcccatcttgaacagctagtgacatatattcaacttttcgtcgtagtaaagccaccgagtctgccatgagaagttcggaagtctgaaagcccttctgggccaacaactcttcgtcaagacatgctgtctgtagagagacgtggaatagtgcaggatcccctagggcaagtggccaccaagagatcagaaacggatttgaagtcgcattaaggtcaagagggtagtactggaaggcgattttgtggaggactaaatgggtaagctaagctttcctcgacaatgctcgattggcggcctacatacagctgtatatcagacgttggacgtgttcccgaggaagtctagtctgtggatacgaatcaaaaggatcaagagacccgaatctgtagttagttaaagtgccagatccatctagagcgcttgttgatgtcccattctgccacccggaagttgccggcccggtcgagggttcgtttgcataggcgcactcgacttggcgtttgacgcagcgggaacagcgcggtgtacgaagatcgcagctggactttgatttggcacacgcgtcacaggaccggcggagagattggcgcattctgaaaagatatattgtgcatccaaagggggcctgtgttcgctctaggaatagctcaagctgggccctcacaccgcttttgatctcacgattcgaatcagagttggaacggcgcaaacgtagcttgacaaaggtcggctcaatgttgaagtttccaggcgattattccgttatatgtgggacctcaggttcaggtcccgagtgcgaatcgaaaaaggactagaccccgctctacccctgcttggcatcggagtctagtcctaattgggtaatttgcataatctgtggataactatctgggcccacaagtatatcatgccattcctaagcaacactgccgtacttgttaggtgttctctgtcctttcagaagaagagccagtttgtcaacttgcccctatcatctaccatcatggactcgaatatggcttttgagatggccaacacctcaatcgcccagaatgagctgccgcagatatggccttccaaccaacctcagtcccaaagctacctgatgacctccttgatgaggttgtcagtttggcaatatgcagtgacattcctaatcgccgtattagtctatgatcaaggtaggctaagcctttgagactataagaactcgctgatgccgtctctagtgatgtatatcaaacggaaaggctctatagctggacctccactcaagattccgctcatgggcccctttatacaagctctgcatccgaagtttgaagggtatcttgcgcagtgggcaagtggaccactcagctgcgtatctgtcttccacaagtgagtgctcacgtcttcgtctcatcgaactttatcaaaccaatcaagctgtccaaactaacgcaatttattcagatttgtcgttctagcctccgatagagacatagcccacaaagtgttcaagtcgcccacatacgccgagccatgtatagtgccgatcgcaaaggatatcctaggccataaagcatgggtctttcttcagggtagagatcacaccgagtaccgcagggggttgacgcccctattcaccaatagggctatggctacatatctgccggtgcaagagaaggtgctaggcgattattttgacaaatttgtcgccgctagcaaggcgaatcaaggaaagcccaaggaattcatgaccatgtttcgcgagatcaactgtgcactttcttgccgcacttttttcggtgattatatctcccaggccgcggtcaagaagattgcagacgatttctaccttgccacagccgccctggagttagtgaacgtgcctctgtcgatgtacattccgttcaccaagccctggctcgggaagcggacagccgacgctgtccatgccgaattttcaaaatgcgcggctgcatgcaaagcaaacatggcgacaggcgcgacgcctacgtgcatcgtagaccactgggtgctccatatgatggaatccaagcgataccacgaaagaatcgccgcgggggaaacggacgccgagaagccgacgaacatgatccgcgagttcacgaatgaggaaatcggagagaccttgttcacattcctctttgcgtctcaggatgcgtcgagcagtgccacgacttggattttccaaatcctggcccagcggccggacgtgcttgataaattgcgtcaagaaaatctggacgctcgcggtggtgataagaacaagtctttcgatcttcccatgctcgagtcgctcacctacaccaacgcagtcattaaggagcttctgcgtcaccgtccacccgttatcatggttccatacctcgcgacgaagaactttcctgtcacgcccaattataccgttcccaagggcgcgatgatcatcccatcctgttatccagctttacatgatccgaatgtttaccctaatcccgataacttcgatcccgagcgttggatatccggggatgccgagtccaaaactaagaattggctagtattcggtgctggaccacacgattgcctcgccaaaaaatacgtgccgttgtcaatggctggtatgatcggaaaagcggcgctggaacttgactggaagcatcatgccacagagagatcagaggagattcgagtttttgccaccctgtttccaatggttagtactgctattgatccatctcaaggaccattccgcccgtatcttgtgctgacatttgacataggacggatgcccgctggtattcacaaaacgttcatagaggcgttgcttgcatttcctgggatggagttgagtttctgcgtcctacgctctttcgcagtggaatggtgccattcgtgaggacgtttctaggaccgtcgacctgtaaagtcgtgtttatcatgttcgtatatttgtctttcttgggccatcgtacaaatacatatttcgcataattccaaaatgtacaaaagcttctcgacttaccctgttatggattcccttccttcgagaccaggtggaggatctttttgacaagctcctgagtcccataaggtttatggatgatatcatccattccagcactgagcatttccttctgttgttcgtctctagcattcgctgtgactcccagaatgggtacatgttctccactttccttttcaatgtcacgaattgctttagtggcgcggttgccatccatcaccggcatctgctggtccatgagaatgcagtcaaatgagtgttttttattcgcatccacagcctcttccccgttgctcgcttcaactatgttaaagcccagtgtattcaacctgcgcgagataatccgtctgttgataatgttatcctcagccaagagaatacgctggccgtcgcctgttagtttctcgtgatcataacgtgatggaggcttttgaccctttctttcgacctgctcgttctctacctcgtgggctatactttgagtccgaagtgtgcctgcgtcctttgggccgcctggctgtgcctcagagatgctatcttcaggggggtttgccggcatctgggggttggctgtcgtttcatcgacaccgcgcattttatttcccattgcctggatatcaacacagagcttatcgattgcggaaacctcgacactatcatcttcttcgccagcttcgttggttgttctgcgtactttgaaaaagaacccgaaggtacttccgtgggatttcttggagctcacaccaatctcacccccatgtaggtggcagagcttcctgcacacattcagcccaaggccagagccaccgtaaatgctctcggttttcggggtagcttggttgaaacgttcgaagaggcgtttctgggcttgcccagtcacgccaatacccgagtctttgacggcgaccatgatatatgcaacttcaccacttccccattcggaattgttggtcgcatcttggcggagctctgattcacctgaatcgaagaagacaatatttggcgggtacgaagttggacgttcgatcgaagcagctatcgagactcggatcgatcgctcaccctccgattgcgcggtgaatttgatagcattcgagagtatgttgatgagaacttggcccattcgatctaggtctgccataacccaatcaatgccgcatttggcatatgtagaatcggtcttgtattcgaagtgtattctgtgctttcggagttctggtcggaatatcgacatcggaatagtgaggtgtcgctgtggctggacctttcgtggcgatagtggcagcatcgacgcgtcaagttttgaaaatgtgagaacgtcattgacgattttcttttgatgcctgatgcaaagactaattgtctctgttgcctcagtgatgtccatgactgagatatcacccgggttcttgttatagattgcctcttgaatatcctccgtgcaatgtactatcgcagatagaggattgcgaatttcgtggctgatcatatcgataaatcgctcttgttgcttcttgcgttcctgtgcctcttcggcagcgtgcttttgtaggagctctgcccttttctctggggtgatgtctgcgactgtacagatgaacacgccatcgtcgccaagcccaaagcattgtacatccttatcgtccaaccggtccaaagtcatgacacaccaaaccgagtccgggtcgcgcgtgtggtattctagacgcagcggtcgtttggaggttgcaacctcccgatacccagtggacacccggtcgtagtcgtcaggatggacggagcgtaaccaacactcagagaagttgatgctggggtgtggaatgagttcacggaaccgtcgattcacggagatcagttcgtatcggtgggtgaggatagcgacgccgttcggtagaatgtcggccagctgttgcgctgagacattctgattgaaagagaaagtcatctatttcttcgcgccgaatcgcgcttcttccaatcccaatggaagatatgtcagaggctgatagaaaatgctcgatgactgctcaattatgtggtacctgcaaaagattcgggtaggcgcatggcgggtgaggctgaactgcgatttcgtcgatcttccgtctgtagattggttgtttctgtaagccagcaagccaacatatactggcttatatgagatcccttcaaatacggaagggtatgacgatttatagtgtcgtacgtcattgtccctcttcggtctacttctaatgtgggggaaagtatttcaaacgttgtgattggcagaagtgaaagtgattccactgaagtgacaccccctggatgcttggcacgtgccctgcatgctgacgtcatttaaacttcaatagttaactaaccgagccctagaaagtagttatctggctttcataagctctgcttttttcttttttatgtgggattaatgcataataatggcatgtgattttctgctcatgattttggaatatgaattatgcacagtccctattcaggttgactgcgagacatctcataattctaggaacgcgagggtacgaagaagattgaagggttgttacaaagccgggtctttgtcgtgatgcaaaaccattgaatagaatataattccagcctagtgtccaaaataaggtatgaaaaaaaaggcgaaatgtgggtgttttgagagcgccccgaggtgtaagagttatatgtcaaatgcagaaccgcgaatactataacattctattcttgcaccatgaaggctctccaacttagaatctcgtaaagcaggctatgtggggaaggaaccatgtgttgaatcgagctgttgactagggaacaaaggcattcatccacatcgggcagtaaagctaccgcgacatacatacatagataatcatgcccaatcatcaatggtcatgctgatcatgttggtcagagcttttgcttgaccagcgatcagcttggcaaagcaggagaggatgtccctattgctcacgatcggcttggcaaaagtgatccgagtgttggaggggtagttacggagtacttcgcactccgttggtaggttggaggggtggctcctttacataccatatatcaattattggccagtttgacgaattcagcaaatagaaaactttatccacagccacagtatagaaggagtgaggactgcgctcttttattagagagcgtactccgtatgcataacggagtacgaaatgcagaaactgcaaaaagcacaaatgggaagattttgaaattttcgacagtggagaatggttccccactcggagtcagaggtctagaagaccctgtgggtgatgaacgtgctgtcgcggaggaaaaattagcgtggccaatctcaatttgactacggagtagatacccgcaatggtagaaatgtaacatatttcctacaaataatacactaagtaatagctggatttatctcttttagccaggctcatatatttttagataatgccggccttggaagtagccctgaaaatatcaaagttcgctaacgagccctatcgggatcccgtgggccttagcgctcggcccgataacgtttaagtttctttttttttaagattaaaggtttcaagctgatagccactttcaacacgccattgatgcgttggctctacagaccgtgagggaaatggaatggtcacacggcatatgcattgcgttatcaaagccacattttaatcataatagtcgtacactatctcgcatgtgcgagtgatagggccagttattcttcctctccacacctcgtgggtcttcctatcttaaagaggtaacccgagagaacacgctccattctaagatcttacttgaaaaggtaatccgaagggcctcactccactttttaaactggatcgattgaagattttgatttttagtttgatagtaaatcctatattagtatgaaagtaggtgccagtactaccctcgctattcgtttccatcttcattccatcttcgcaatcacaatgggcattgttgactatctcacccaaccgcgtgtccatcaggtacatggtggtgatgaaacacccaccacggaagtcccaaaagtaatcgagcccaatattatctctagtccagacttttcaggcgctgttacacctgcgcacattctcccttccccagctggtagcgaggatcctcttattttcgagaagatcccgcatcagtttggccgtctgggttcttggagagggtgtttgattttgtttgttacctccggctctcagtttctcgacaatgtcttcatgacaagcgccaacattgccctgtcggcaattcagcaggatttcggcgtgtctagtactgatttgcaatggatgatctctgcatacaccttgtcgtttggtggcttccttttgttggccggtgctttgtctgatcggtatgacttcctcttattgtctctaaacttgacatcatgctaacctgcacagttatggacgaaagaagatactctgtctgggtcttgcctggctttctgtgtggaccctggctattggatttgggcagtcgtttattcaacttacggtgttccgtggcatccaaggaattggagctgcgatgactgtgccatccgccattgggatcatcagctcctactttagtggggttgatcgcacccgagcactatcaatctatggagcttcagggaccctagggttctgtaccggtcttatatttggcggtttcttgacctcttcgttgggctggagatatatcttctatctgattgtcatcatcactggatccttgggaatcatgggctttatcgtcctcccaagcgacgttgcttccgaaaagaagcaagaaagaatggactacatcggtgcagtgatatctacagctggcctgatcctgctccagttcgtcttgtccagtggtggaacctacgggtgggaccagccgttcattatcgtgctgctgatcttggcggttggtcttctcgttggcttcgcaatccttgagaaatacgtcagcaacccaatcatgccgctttctttgtggaagattcgcaatttcgccggtctttgggttattggttttagtaagttgcctgtttttcggattcgtgcttcggacaaggctaattataaatagctggatacggcacctaccaaaacgttattttctatatcgtccttatggcacagaaagtggacaaactttctgctggtgacaccgcccttcgcttcttgcctatgggagccattggcttcattgcttcccttggaacaggaaaactccttgaatacatgaatggaaaacacctcctcattgtcggactagttctggctgtggtcgcccccatctcgagtgctttgacttccaaccccgaagcaggcttgtatgtatcgctatttctttcttggataaaactatactaactctcacagttggctcaacgttcttcccacatcccttatcagtatctcatccgtatcttttgtcttcgtcacgacgagcactgtggtactcacaagtgtaccggttgaagtcaagagtcttgctggcggaatggtgagtttttgttccctgcattccaaccgtttacactaacatcttaactagcttaacactgcattccaaattggatctggtgttgcgttggctatctcggcagctgttaccgatgccgtcgacatccagcaaggacacagtctcgcagaccagtatgctaccggcctttggtgctcggtcggtctagctgggcttggactgatagttggtgttctggctgttcgacacaaaggcattggaccgaaagatagattgggcgcaggcccagttgctatgtaactccgtgtgatgactttttctcggcttttcttatatagatgataggtagactttttctttaatcatgatggatatagcgtttagttagtatgacgagggaaatgggataaatctataatagttggcgtttgttcacaatatcaaaagttttcacacttaggtagttctcagtaccgaggagcgaaccaaatacgagggaatagcaaatgtcacggctcgtacccctctgagctttcagacgtaccttcctaatcgggtaactaccgctttgatattaaggttgcctcacacctacaccgccttccaattttatgtaccatttttgtatgtcaaactccccatacaacagtggcaagacagtaggaacctgcaatttgtatgtaaattactgacagaattaagtcacttttttcatattaaccactttatcgtcaagtgcttcatcgttaaggggctaaatcctatacaaagtgggtagaatatacgcttttccgatcaaaatgcaatttcttttcctatgtaaaccagaagtgggcagtactttttgattgtatcgaattaggaagacggtaaacaaaatttagccagggtcgtatcaatcccttcctcaaccgttgtgccagatgtgccctcatcttttgtccgatggaacggattcgtcaacaacacttcggaggcgcttaagtagtcttggcctgcaagtaatataggtaacaaattaacacaagtcaattgtaaatagccttcgaaccttggaagctacaatttaaggccttataataaggcaacgaacgcctcgaactcacatagtcacgtgtataccaggtcggccgcatttggaccaggtcgcgatgcattcatagcaagctgttctcggccggcattcgaggaatgtaagagaaaaaaaattttaccgcaatgtaattttgggttgccttggactttagtcctcccaaggtggtgaacgacttgattagcatcaatcctcattgttgttagcgctgctcaccatgatcgccaggagaaaggtccttcaaatggccgcaatggcggccattacaacttacatcctctgcacggtatttgtccgaagctttggagatagagaatggcccacctcgtcttccaaactctctcagaactccatgggcgataatgttttcgaacacatacgaaacagcactcttggagttagttcttgcctaccgtctgacggaattcattgctgacttgaatattaatttccagtttgagcatatctatgcgatcagtatgaaagagcggaccgacaagcgcgatttcctcacactagcagcctcgatatcggggttcaaggtggaatggctcgagggagtgcgacccgatgatctacatcctaaggccatgcctgacgtatgctctccagttcaataaaccccagacaatattctcattctttctcagggactcgagacctcacccgtgaagctcaccgctgtggcatgttggcgtgcgcacatgaatgcattggtcaagtacagtcacaacttattctcatttttcagaggctatgctgacgattggacatttaaaaaatagtgtgataagcaatgactactcaaccgctttgattttggaggatgacgcagactgggacgtgagtctcaagtcccagctcggtgaatttgcgcgcgggctgcacgccttgaaagggaccaatcaggtatccaaagaagctccttatggaacagattgggatctcctttggatcggcggatgtgcctcgggcccgaacgccaacgaaacaagcttctacgctatacccatggaccccacagttccgagggtccaccaccgagccacctggggcggacccaccgaaaactggaagcaacaatatccagaattggccgaggactcgacgcgattcatctatcgggctgaaatgggctgctgcatgtttggatatgcagttacaaccaagggcgctaggaacattctttccgctctttccattgatcatttggataagccggtagatgatgccctcagtgaattgtgcgcgggtgctaatgggcgccgcaagattgaatgctgggctccgtttcccaatttgattggtacgtatagaaaggctggatcggctgcccgggattcagatatcgagagcaacaacgcggctgaattccacgaagagctggcctggaatatggtatacagcaccaggcgtaatatccaccaattagttgctagtgaggaaattgtttactcacaatggaaggatgaagatgtgccatggtcgagtaaagagattaagcacaaggagtttgtttatcctggtggatatcttgtcaattaatcttagctcaaatttccgaatgctagttacaattctaccgcaaacattttcgcacaacccacacccaaatatacatctccgtccggagaatttcgcggagggactgtatatatacctcggcattatacctttgttctttcctagggttaaaccttgttaaagcttgatagtgagagtgttggatcaaatttggtttgttagatcttggctttgagttatttaaaacccccttgcttcgtaaaggagttgcggcaaaaattgtatagtttcgattttcataaacgaatgagaggccacggtactgtatagtaattgtagccaattgtgtagtatcattccatacggaattcctcagcccttggcatttgggattaagtttcgggcttttatgctctatctctttctcataggcagagcttaggaaattggcttagggtcggcccgagtgggtttccatcggaatattattgtgagggttaattatcttattgatatcttatttatgtgaataccccaagtggacttgcaatatatgttctccatgagtgatactcaacagctaattgtagcttcaagtgcaacttgcgaatcaatgaccatggactctgtacggtatagctcatcaaaaaatattcagcgtgttgagttggagatgcctagacactcaactcatgggggagacttccccttgcgtcggctcttaggtaccatttacgccagactttggggtgtcttcagcaatcctactatggctttcacctctcctattactctccctttctgtgcattcttgagccctgtcacaagggccttccccgttatgtcttcctctcctcttccaaatatcgtcggcctggccactagaagcccttggctctagagccagccggaagaatgagtccaatagccttgcatgttctcttctagatcatgtggcttaaatgtcctaattgggctcagtggcaatgagaagataatgcaccaaagaatggaatgcctagagcgtgatactaaggagccaaaataagcgggcctcgactgtcctcgttttccttaaatctcgaggatttcaccgagttgacagcggctgatatatccatctgacttgtacagaaatcttcgacgatccgttgatcacgatcctaatcccgccgatccattataactatacagtcctacacatgccacgattccttggccttcggggcaatagcctcaatatagctgccatttttggggtgctcatgccgggaatcctcacaataggctacaatgcatcactgctcgggggtgtgttgacactgaagaacttcgaagaacaattccccgaaatcaacattgccgctgctgttgataaaccacatgcgtcaacaatccaaggcattgttgtagcctcttacacaataggaggcttcttcgggactctctcctgtatatggctaggtgacagatttggccgccgacgcacgataatggcaggatcagtcgtccaagtcgttggagctgttttgatggcttgttcaggctctctcattcaactcatcacgtctcggatcatcctcggtgtaggcactggtgttctactggccacaatccctctttggcaatcggagatctcgcctgccaacaaacgtggtgctcacgtcggcatgaaggggatattcagcggttttgggtgtgccctggccctttttctcgactttggaatgtcattcactcaaggcagtgttgcctggagatttcctttcgcttttgtggtgctactttccatcgctgttctagtgttcatctacctgttacctgaatctcctcggtggcttatccgacaaggccgactatccgaagctagtgaagtcctggcagctctcgaagacacatgtgtcgacgatcaagccgtggaagcaaaaatcaaagaagtccaaatatcactggacttgtttgaggaaaagtcactggggcaaatattccacatgggccctcaaagaacattccaccgagctatgattgctgctttggcaatgttgttcttgcaactcaccggctctacggtcatcaccttttacagtacgtatcccgaattatctatcgccatttatacaatatattgacccattctgcacattttcagcaaccgcaatcttcgaaaacaatctttccctcgataactcaacatccacggtcctggcagcggtctaccagctagttggccccatgggaggagccttctgcgttttcaaaattgacagactcggccgccgtgtgttgcttttaggcagtgcaatcggaaacgttgtctgtctggctttagtagctggcctcggaacccaagccgataaccctctcgccatgcgcggtgctgttttcttcatttttctgtttcatttcagctatatcatcggatttggcgcaataccatatctctacgccgcggagattgcgcctttgcatctacgcacaactatcaacagctttagcatcagcatatcctgggcggttagcatcttactcactgtcgtcactcccattgcattcaacagtatgggacagacatactttgtcattttcgcgggctgcaatgcaatgatgatacctgttatctattacctgtttcctgagaccgccgggcgcagtctggaggaaatggataggatcttcgctctttcgcgacgtcctttggatgctgtcaaggttgctcggcttcttcaacagggacaatcatttgacttgtcgcttgaaaaggaacttgactcaagcttcaagtgcccggagcttcagcttcgcgaggtatattcggcttgatatttacattcttatgactaagtccaacatttctattcgcgggaaataatagtctacacatggaaagcctcaaggaagcttcaaggtcctatgattcctccgcccagatgccattattttacctggactgataccagacgggagaggtgttaagtcaaagaagataacaaatatacgggtatgtacatactgattaccgagtacgccagtagatgtgtagacgaacatgcatgaagaccaaaacgtaacaacctggaaaactttgaataacaacaaatcaaatctcgggtcagaaatcacaagcaatagatgacagatacaggtaagaatttccatcatgttttgcccctttttttgggttcctttttggcttctttctttgctttgatctctggcttggtcttttcagcagctttgatattttcagcttgcatcttttcttcagcttgaatcttttcttcagccttaatcttctcagcttggatctcttcttcagcttgggccttttcttcagccttgatcttttcggcttggatcttttcttcaatttggatctcgtctctaatctctctttcggctcgcaaggtgattgccaatagaatcgcccctatctccttcatgtcggattttttcgttatatcccatggaccgtactggttcatgatcaagaacgacgaagtgtcatccggatatgcagctttcttatcgcttagatattcgagatactcttcctcatacttcgcaaccgtcacccatagctcatgcctgtcttgcgctatgtgtaagcgcctattaatatgttagcatattcgtagttgacccaagaaaggataaatacatacaggttgttggtacgctgggccaagtcgtcatcgcttttgatccaagcgaccatttgggcgctctcctgcgtccgaataggtaccatatttagctttcttgtgacgggtttcacctcaatgatcgctctggtcttcccgccagggctatcgagatagccatccgtccttgcttcaaactgtgcgttttcaaaggtagcgataaatggctttctgtgcaaggtccaattcgagtagaaatcaaagtgcatggtaagagcattgagaaatacgatgagcgccgtattgacaatttgttcatctctcgtggggggatataaaattctgtccatttcgcgtgaggttgtgtttggcgggctggggtcagaagtagggcttgagccagggctctcatcatcttccggtttaaagatccgactatgaaatgggggcgaggtcttattatcgaagtcataagatatgtctccagatggcttgcgcgattctcttgatggagtctgaggatcctccaaagtcattcctttcattcctctaactagcggaggattcgtttttgcacgggttcgggacgcgataggcgtgtcaaatgtttcagggtcggcttggggtttggtcttttcaacctcctgatggtagtatttgacaatggcaaagtttccctccggtcttgctcttgagggctctcctgagcgctctgttatgtgcggttctgggatcccaagaccatcacagaatgtagaccacgactgataagagcgaagctttttctcggcctctcttatccaatatttgatgtccggtacattggttatgtttcttttgtgcgtcttccatatcactcggaggagtaagaattggtcgaatcccattttggaagcagaagcaagctctttgtcgtgaagttttgctttcttaaggtcacgagaggttaccttgtcgcaccactcctgaaaggttttgggtatttcatccctctcggaagcaagcattgtgttattgaagagaattcaaacagataggcaatattttctagaatgaatgttgtcactgcgtaggaatgatttacaaaatggggataacaatgctctttttatgctgggggggctccttcaattgagaatcacatgctttagtaaggctaattattggtgataatttgatttctaattattaggtatggtagatttttctttcctttgtctttttgtggcgaagcatgcatgtagggcgagtaatggttggatgaggagcaattagttgtgatagtggctgttttggtcatccgagcgatgcatggtatctttagtatacgaagtcgacagttggccattggttaagagagggtctttgttcccaatgaggcaggagctgtagacactaagattagaatagaaggctgctgctgcttatgccgtgtcgttcggtagtctgttcggtgatcttcttgggtatctcctttttaggtacacggaaaaggcgggaaagggtttaaattatagaaacgacctttctgtgtagttataaaagttagattagaatgaacttgaccctttccatgtccgagacaaagaaagtgaagttggtacgttggtacgttggccctggtcttggcgctttggtcgctcggcaactcgcctcatcacatttccccccatcagtgaactctccgccttttcttctctcacctcccactacaacatattgattgtagttactcctatccaagctatacatcatcttcaaatccctcatacgaaacatgacttccgtggaaacacgtgatcatcagctcgaccgctggcttctgatgaaaatcgagcatgcaatcgagaaccttgaggagcataagctcaacaacacagaacttaagaaatggaacattcgcttctccagcatgactctcgatcagaactcagacctcaagccccgcttcttcgcaccgaaacctaacctcccgctaccaaacgatgagatactcgatgaggccgctgaacctgatagtggtgatgatgactattatgcggctgcatacggcatgaatactttcttagattcttatgccttcagccaagtaggcctctggaatgacgggccgtggcgttcgatggagtaagtctaccgctatttggaaattagagttatgtcgctctgtctatttatgatatctaacgctagtcaatagctgtggtcgatacagtacttataagagcctttggttctatggtactccatcacttggcccgtctcccgcatttggcgctttaacaatgatagatagttctgggaaagaatatccacattttaaagcagttatatataccgacatggaggcggatgacaaaacttgtttccgttcagaggtcttgatcagccttcgcctaatgttggcccaattgagaaaggtgcgcctgatgcaccataagatcgcaccggtaattatcgattcttccctttctcctattcctttattctatctttcggcgttactaactaattattctataggttttgcttatctcgttaacggggaagtatgtacgggtattagagtcctattttgatggcgaattgcttcaaattcgctctacctgtctgtacaaattctccgaccgtgactcgatatcgacattgtacatgatgctcgccgggtatatgctcggccctcccatcggagatacctcttctttcccttgagttagtttggatcgggcaaggtgtcacggcttggagtttggttgtatgttattggatattgaaattggtgaagtttgtctttggcgctactgccgcatttcatgcagtgatgtgcttggtacttttcataaaacaggttgataagttgaaactctatggcagatctcatttttaagatgttgcaccgagtaaacccttacattacccacgatcctctaatatgtttgaattggatctcatggtcagcgcatataaagttcggcttcccacatacttctgtctttccgcttggcgtatcatgacggcaggatgagtggagtagtggagtagtggaggttatcagtgtgatagtaatccaaaagtgggggttcgatgatttatgatattcgagagctcaaggatgatatattctgtactgtcaatggctgaaatttattaatttccaagtttccaacagactctcaattacatcagagtctcgacatagcgatatacaaaaatgaaggatgggtatttgctatagcgattgaagccagctatgtatatatccacataacagcgtacataatagagcgtgccgttcaataggcatcatcgatatgcacatgggataattcgtagttatataattgactactttgtaagattccgacaaagatgcatgtgcccgcatctacagggaaacctaagaccaacgtcttctccaagagtgggatacacactatcttcattcttctttgctccatctcgcctactgaaactccattttatcaatcgatcatgcctttgcccgagtcctgtattgggaaacgaaggcgaaatagaaacgcctcaggcaaaccaaaagcaagcaaagcgcggtcctgcgaggcttgtcggcgcttgaaaacgcgatgcgaaaccggcaactcggaccgatgtcatcgttgtgatgttctcaggtagggaaccaggtttgataatgtgggttaccaagctcttacatctaactatcttcagggttaggtgctctttccaggccatttcccgcagccacccggaactgatgctggaggcggaggtggactctgcgacaagcggcgacgactaccattcgcggtatgccctcctcccgtgctgggctttttaagacttggtcgatgtactgatgaacaataggctttgtgcggtggaaaacaccttgagtcaacttcaagcatcactatctgtccacagtgatgctgactgccggaatagaccaggggtaaattccagttacctaaagtatatactggcaatacatttaattgaatactctaggctccatcaaccattgaacgaactgcacgcgatgcacccatgaatcttatccaagagatccgacagaatatcacattacatgaacaaccatcgaccagcgatgatagcactgaagatattatcatcaacggtatagtttccgaggaacttgctatcgtgcttctgaaagggtgagcatgcgggacgttctcgtagaacatatcccaatgttaactttccagattctcgaaattatccaagcgctggttattcatgagtacagaccccgtccagctacgcaccaaatcgccgctcctgtttggtacctgtattttggcaggtctccatatcaccccctccttgtatgggtcatcaacacatcaagctttgtatcgccatattcacggactgctgggccaggcacatctttcttccactgcctcgctcgacacaatacaatctatgttgattttctccatgtgggacctgcgcccaactttgggtcctgatcatggtacctcgtggcttctcagtggcacggcggctatgcgggtgatcatgactacttcgtttgggcagcttccaaagacaagcgacgccgatagaagcgaacgagccagagcacaagaaataatgcgcacgtggaacttgatttgcctctgtcagttacagtgcgttacaatgaccaagtctcgatccttccaatgtctatatcatctaacactaatcttagattttccgtgggctctggtcgtccaccgattatatccagccagtactttgacgaatgtaccaacgttctcgattttccgtcatacaatgcacgcgacgagcttgtattggctggagtcaggttataccgactcctttgggaaatcctaagctcaaacgtgatacaaaggggaagtgctgtttggcctgaaatcgacaacttgcgaaagacccaggagaatatttacagtgagcaagaaatatacaatcgccgcattgaataagcactaattcctattttatagagcttgattcctcgcaaccattacggtttgcatacgcctgcacgtacctgattctggcacgtcgcacactccaacatacgagcgaaactcaacctgaaggaatgaccaactccaggataacacaagagggaccaacactcccgttaattcggttcgcgattagccagtcgcttcaactcttgaatttatttgtctccatgtcggatttgaccacttatatccatcctgcttacgagaatgtgctttgttcctttgcaatggtgacactagctgagtttgtggtccatttagaggacgtgggaagtataatttttctcatggaacaagccgtctctcatattcaatgtggaggcaaagctgagccggtgagccggtggtctctgaacatcatgaagcaacatgtcgcagataggattgagcaagaagattgtgtcacttcgacgggagagaatggcacagggatttatatgccgcagtcagttcaaaatgctactgagccctgggtttgcaacgaatggggcatcgagcaggagttcccatcactcgaagacatgttcttcagtaatgtgatttgaactgaggaataaataagggattgttaatttatcctcccgcgcctgagtcttcaggtgcacatccctgttttacctgacgcctagttactttcatctactgcgctctataccgccttcgaattttatacaccgctttcgtgacaatagacctacaatttgtacggcgtatgtaaattaacaaagttaagtcacttcaactgcactaactgcttcatccatcaaggagctgagtcctatagtaatcgggtagaatatacgattttttccgatcaaaatgcacgtttcttcactatgtaaaccagaagttggcagaatatatggtcttacctaatatggaaggcggtactgaaaactcaggcggtcaaattagcaatccccaataaatattggctcccccattgtgaacatcaaccatttactcatatcagttccatatatacattcaaaatgcggaaatcaactgcgctctctcaatctgagacctgcctggcaccccttgggctttttcgagaatccttcgtgtgattccatgattggctggtacaacgcgaactcatatcgatgaaacaaagttccaataattagctgcagctccatgatggcgacgttctgtccgacacatgcccgggggccatatgagaatgggttgaaagcagttttctgtcgggcagtcaggttcaaccagcggtcaggcttgaattcctcgacatcgtctccccaaatatccttcatatgatggatagtataggagggcaccgaaagtactgttccaggagggaagtggaacccatcaaaatcgacacccgggctatgatcggcgaccaaacgtggcaggccaatagccgaggtagaatgaagtcgcatcgcttcatcaatgcatcttcgcaggaacgggagatccttgatctgagaataagatgcgatctttgcttcggggtctattgcgcggtccagctcttcttgtagtcggggaactatcgtgcccggtgcactgcgttctccatgcaggatccagtaaaagatgccgcacgccgtgttagatattgtgtcagagccagcgataagctgcgtcagagcctctgctatcagctcatcccgctccattggcattccattcgcatcttttgcttgtagcaagcgcgacagaatatcgttgcgcgagtcgaccattcccttctccgcggcatccagtcgtgatgcgacagcggcgacagcaatccccgtcaggttctccacggccgctacgcccttggtgaaaaatgggtctgggaggtaccgagcccatgggcgcagtgctggaagaaggcccaatgtcgaagatatctcgcctcgtctattcaacacgtcgactgccggggtgtatgaaatgggtcctccggtcacgagctgcgtttcggtctcgtctttgcccttgtttaccattccaaatggtgagccgaatgccagatctccgattatgtcgaaagcaaggtagctgaaccagggcattgcgttatatcgagcaaattccttcccattccgctgtggctgagaagccgcgatccggtccagctgggttgtccagcgctgtaggttttccgccataaatggctcaaactcagcgactgacctgggagagaaagcatgggatataatcttccgcttgcgtgtgtgttcggcgcggtcgcgaacattgaacatgcccggggttcgcgccacaaatgcttcataatagtgactaaaggtgtttcgttaacactagtaattttcaatatagggaagaaatgtgagttactccttgaggaagccatttccgtgcccgtaaacaatattcaatgcccgttcgtcggcgatagacacatggttgaaaccaatacggacgacattgccgtgttttcgatgcgccgcgtcgactgctgcatatttccggccatgtttggcacttaatccgacccatatgttgctaaatttagcaacaaaaggaccggggacttgacttaagtgtccatatgaaactaaataggggtatatgtagtagaccgcgaaccacacgggaatagccacggccatagcccatggcgagagcaaaagggatagtagagccatttgataaacagagatgaatgaattgatagactagagattatgccattctcttcctcttttttaaatggaatcagttgcactcgacatttcacatgttcgctatctgtccgacggagtacaaccaacaccgtcggagacgagagaaccgatatgcagaatcgatgtacaaggaccaaagaacctgcagatagataattgaccccgcaacattggaaaagtaaagatagagaattggaatgcagtttattggttaattttggacagctctgaggttgttcctcgaatgtccgcggtgataagcggccataacgcggcattttcatttcccgaaacctccgctctcacgggcttttccctgtcaaacgcttccaaacatattgaaattccccatggagtctcagtcccgttggcgtcgaaggccagctcggtcttgcattgagtgtctccgtcgcaaaatccgctgtggccgaatgacccctgtacgcgttgtgtctccgtccacgcacaatgtacctacaagctttatggcgatcaacacaagtcccccttgtagtctctagagagcacctcaagacaaccaacactgggtacttccgcaccttcaccgtgacatgctcaacccttcagagatgatcccccgtcatctagtagccagccattagagcctcgcaccactggggtagggacaccaacaccaacaggaacaccacattatagttcggcttttcctggtcaggttgatgaacacccaaggcaagcacaagccacaaactcagctattgcagatcttttgcaacgggtccagggcctggaacagtcggcacaaaagcctgtgcatggcttgtgttgctgctgtcggttctggaatcaccgtcgaatcccctgcttggccttgaactcccgtctcgcaagatctcagatattttggtgaccttgtatttgaaatccttcgagtcaacacaccgcatacttcatataccttccttttgggttgactaccagagatattggaatgatccgcagaatgcctcaaatgagctacgccttacagttcttctcattattgacatagggtcaagcctgcacaaggaggaaaatacagatatcggattccgaaaaatggttcatcgatgggtacatgctgcgcaagcatggctttctgggacactagaaaaagaccgactgagtgtttccgcgctgcaaattgactgtcacaatcgtcgagcgttttccttcccttcgcgcttcggggctccagattgatcttcgaagccatggaattgaagtcatgaagtgcatgggcaaacggcaagcattttttccagcaaacaattttataaaacccagtctaggcttcagtaccaagtacgagatcatgagaggcgatctgtgccgaatcgtctatggtctgagcaaaagccgggccaagtatatcttcggcacgtcaattgagagctacgaggaaaacgacaaggaaaagaccatcaacgtgcgatttgcaaatgccaccgaggacacattcgacctcgtaattggcgctgatggccaagggccacgcacacgaaagatgatgctcggaagagaagcccccgatgcattccgtcccctcaacggtcgctgcatcggatatttcacctttcctcaaccaatcaaagagggggaagggtatgtcgctaccatgtactcggcaccgggcggacgaggtatcatgcttcgaagacgcaatgcgcaagagatccaggcatacctcggcggccaaacgaattcagagaagctcaaggaacatttgcggggtgatgttgcggagcaaaaggaggcgttgaaggtgatacttcaaggggcggggtggagagcggacgagatcttgggatatctcaaagactccaaaaacttctactgtgaacgccttggtctggtcaagatgcctcattggtctcgcggtcgtgtcacgctcgtcggggacgctgcttattgtccgtcagtcatgacaggcatgggtaccacttctgggattgttggtgcctatgtcttggctggggagattggtcggcactgtggtgggccttctgaggagggtaatgattctcttatggctgcggttcaggcatatgaacagacattccgccctgttatcaaccaggtgcaggcaggtgttgccgaggatgagggactttggcattgcacttggaaactatcttatgggagctgcttcccttttgagattggatgttctcagcaagttctctacggatcctgtcaaaaactggaaacttccgacatacaacgagttgctccgagattagacaacaccaactgtgcaactgtgcaactttgcagccttggaactatttctctgatatctacctgtatttttcctctcaatggcatggttatttgttttatttgcagtacatcagaccatggcttttctttacatataagcgaatctatagcctccaaattaatcatcagtggttcaaagtcagcctgctagagatcttgcaataactctccaatttaatcaactactcaagctattgattggcacacggtgaggagtccatgttttgtttttatttactatgtcggcctcaagcagccagtaacaatacgtttttcctatctgggctagcttggtctctgaaccctggaacctcggaacttaaagcagattacgtaattacgcggggcttgcccgccctacagggcttcatttgtacgagcgatgtgatgggctcctcaattacttgtgctccagttgtcgggatttggcatagattattgccaacacaccatcttcctgcacataaccataacagatcaagcacttgctcactcactatgccgagccagaatacaagctggagacaggaagaacactaaacaaacagatatcatatttgaacaaggtacagagaacccaatctcacctgaagaaaaaaatctcaccccataagcgacctgcagagcaggagatgttcttcacgagctaaactcccgaatcaattacgtacaatctcgggatttggaggtcgcaatttgcattagcagtcttgggagacagggtgcttatcctgtataagcctagcggatgtcattgtctcattgttcctgcggcttggcccgacacggcctacttagttggcgtacttttgcctgcagaatatattagaaccgtgtctagcgacaggaatcttgcaatcagtagtctctccccacgtctttgtcaatattattgctaacatggtttcgacttggctccactgcactccacatctcgacagacgatgtacccttcataagggtaggctgtcatgttgtcgagagggttgctccgctctggaggtccgaccgttcggttgattttaactcttttgatcttatctgatccgcctttcttcgtcttggtttttctttttctcgtggatgtttgtatttattaggctgcaatacacacacctacgccagtctgatatatacctcgccaaatcatggataaattacccaacgcaatggccaccgaagccctccccaaggatcaggacctggccgaccctgagctacaaggaatcttagaaggaaacgcccgattccgtcggttaggctggaagcggctcactgtcatttcgatagtcgaggccatcgccctaggaagcctagggctaccatctgcattcgccgccctcggcatggtcgcaggcgtgatcctaaccatcggactcggcttcgttgccatctacgcaggctacagcatcggcgaagtcaaactacgctatccacaagtcggtcactacgcagacgtcggccaactcctgctggggaacgtgggatcgaagatcttcgtgggcagcttcgttgctctgctcatcttcgtgattgggtcgcactgcttgaccggcgccatcgcattcgagactatcacgcaaagcagctcgtgctcgattatcttcagcgttgcatctgctgcaatcctgatgctgctcgctatcccgccgtcgtttgctgagattgcgattctggggtatattgactttgcgtcgattctcgtggctattggcgttacgatgattgcgactgggatccagagctcgaatggttccggtggctttgctgctgcggatgttttggcgtggtctgcttggccgaagccgggtcttactttctctgcggctatcgtggccactaataatattgtttttgcgtattcttttgctgggtgtttgccgtcgttcatggaggatatgcatacccctgaggattatgtcaagacgctgtggtggctaggcggtatccagattgttatctataccctgactgggtctatcatctatgcgtttgtcgggcagggcgtgcaatcgcctgcgttgctgtctgcgggcccgattgtctcgagggttgtctttggcatagcgcttccggttatcttcatttcggggtcgatcaatacgacagttgtttgtcgatatatccatggaaaggtgtaccgggactcggctgttcgctttgtcaatacttcgaaggggtggagcacgtggcttggtcttgtgttctgtgttaccatcctggcctggatcattgccgaggctatccccatcttttctgaattgctctctatcatttctgccttgtttgtgtctggtttgtcgttctatatcccaccaatcatgtggtatatgcttttgaaagagggggcatggtatgagaagcacaatttgaagcctgcgattttgaatggtgtggtattcctcgtgggcatgattatttttggatgtggtacatattctagcgtcgctgaactggtaagcccttttccttttaccatccgagcaagattactgactatgttttagattgataaattccggtcgggatcagtaagtaagccatttacctgctcttgaaatgtcgcaataacgcggtgatgtcccggcctgccgaaatctgtttatataaaagttccatgcaaatatatgactatcgttccatccatatacctacagcgatatctttctacttcatctaagtcttgtttgtgcgtagcgtcaaagaatagtagtttaaatatagctaaatacaacataaaaaacacaataaaaagtccatggtgtctaccgcgtttacttatacttacctcgtcccctcattgctcctttcaaccccatccatcggatctccaacccagtggttcccctcaaagaacgcctgtaaagcaccatcactatcacccaccagtccttcttcattaaacatctcagtatccaaaacgccaagcataggatcgccaacatcccccaggagttgttccccagcgggagcagatacaggtacaggtacagccgcagggacaggagcaggagcaagggcaagggtagggagagggacaggggcacgggtaggagcaggggagtagttagtatcagagaactcagggcccgccgaatcaatgtcatcgtccgattcacgagcagagtcagtgccagtcgcggacgtcacggccgtcttgcgtgttctcgttatccttcttttgcgggttactggggcattcgtcgcagcctcattttctgctccggtttccgcttcggtatttgctcctgcgcctgcgcctgcgcctgcttccgcctccgcctccgccctcttccgtttcgtcttggcgtgtctttcggccgcgtatcgggctacctgttcagaacggcggttatgcgcaatcgcgttactacccattttctcggttggacgagccaatgctggctgtttaggggttagggcaccacctgtagaagaatagaaatattagcatgtgatctttcttccaatcaaaaaccaaaccaaactagaaggctaactaagccatacctttaataacaccagtccgaataataatcgtcatattaggcctaggcaacggcgagcgcctatcaccccgaaacggatccggagacgggttccgcagtctaggccaatactcgcgaatagtccgcacaatcgtagatgcgaaattcaacgcggccatccgcacctcgccaatctgtgggttagcaacgttcgcaggatcgatttggtctagggagagatggcttagccagattgtttccctgtctcgtagatagccttcccgcgtgaggttctgtttgaagagctcgaattggatgttcgcgatgttgatccagtctccgtctgggcaggtatcttgtggatttactttgtcggttaggaagtcgcttactcgcattgcgagtggcatgtcagggtggtctgcgcggattatctgcacgtcgccgttggggactatgtacggccggccgtagtcgaatttgttttgtcggtctgggtttctttgggcggaccttgctggctgttgcggttgctgctctgctggtggctgttctggttggggtgatgattgctgtgctagttgatgtgctagttctccttctagttgctcttctacctgctgttcagatacctcgatggaatgctgtacggacttggatactcccctctgcacgggctgtgctgcggtcttctctccccctgtctgttctgccagtggattctgccgtctgtcaaattccgtctgcaactcgtcttggatgcaattcaggtatttatacagcgctccgcatagaagagtgtggtccgttacgtgggctagagtagcggctggtaatctcggcagtcgcttgcgccactcaattagcattttatcgcgcgacgcacttgaccggaaaacgttgacgaggactcggccattgttcagagcgtcgagcgcgacgatgtcgtagacttcttgtgctagatcgtggaggagctgttggtcggtggggctgtatagtatgtcaagacgcttgaatacgtatttgtcgtcgaagttgtgtggccaacgactgagcggctgcggctgtggaggcattttgttagctttgaatgatgtattcgaatggtctggaatggagggtcatggaggattctgttcactatttaatactcgagaggctttgtgactgcattgtggccttggatctcgatattccaatatgcattgtatctgaaagagacaaaggaacaaagaagacgtgatagagactaaattaggtcaaagaatactctatcgaggtgaggtttcaaggtcaacactattattacgcaaataatgagatatctagtctcgatatttttagattgttagatctaactatgaggtattgtggcggccggggggggccttctccacccccccccnnnnnnnnnnnnnnnnnnnnnnnnnnnnnnnnnnnnnnnnnnnnnnnnnnnnnnnnnnnnnnnnnnnnnnnnnnnnnnnnnnnnnnnnnnnnnnnnnnnnnnnnnnnnnnnnnnnnnnnnttgggggcggctggtgggcccattcccaccccgccacgttcaggatggcgagatttgatcatttccaaactcgaatgattctagacccgagaatacagacagttacgattacagagagaggtttgaaagaaatgacgtggatatttgcattgataactccttataaaatatgaacacaaaattcataggtatgaccttccaggcgaccaatcgccagaatccatagaagaaacgaaatagcaattgctcacatacccttcctccgcgtattttcgtgattcatttttgaaattttcgtcaagcaagaaatcttacgagacgtaagccttgccagccaggttgagagtgctgccgctgagcaagtagttctcagcgcacatgaagtaagagtaacgagtgacagcagactgctcatccaaccaagggatcacctcgttgaggaaagcagcagtagcagagggatcggcagagccattgacatcagcgttgagagcaaactcggtgatccagagctcggacaggttgttgctggaagcagcactggcggccttggtgacaaaggacttgaaatcgtcggcagtgtcaccgtaccagtgaacggccaaaccggtgataccacagctggagcagctaccgatgaaagactcaaaccagtcaagacccaatccggcggtagtggaggaggtgacggcgggcgagatcagcttcgcctggccagaccacggggtgatgtaggtctggtagtagctagcagcatccgaggggctcatgttagcctgggaggtcatgtcgggctcgttgaatcccagaatgtaggtgctgccgctagacaaagcggtctggatggcggtcacccagccgccgaacatattctggccccagagcatggggacgtattcgacgcctgaggggagcgagccagagagatcaccggcccagttgtaggcccacgagatggtgccagcatcggccagagccgacacggtgctgatgtcgttgtaggcggcaccgcgcttgctcgaggagcgcttggcatgcatgggggcggccatggccgaagtggcgacgaggccggcggtgaaaagcttggtgaaagagaccattttgaaagtcaaagtatataagtcacaaaggagtggactagatggtaaaaaggagggaaaaagagagaaacctgttctcgaccttgaaaggaaagtgaggcttagaccgtgcacggcacaggaccagaagaccagaaaacaaatgaaggaagggtaggtggtgaagagaggagggaaagaaggagggaggcggagggtttaaatcccccagggccccagcaatgtgtcaaaccagcctaaccgctggaagatgttccagttccacggtggagtatgggaaatggccattggatgttggccggaggcgtctttggccagaccgtgggatacacggcctcattggcgctggggaatatccgtggaccgttgacagccattggaaccgtgggaatggccttctcctcttacattccttcacacgtgcatcgaagtatactctcccacggcgctaacagagattaattctttcgcttcttcggtatcaaaaaggcacacatcggatgcaactccacagccaagatcgctagtccactccacaatagcctaggccccgatcgggtttgttacatcggattttgtcattgccaagaaagagttcacgtcctggactctgttcctgcgtccgctttgtctgaaatgacaattggcttgcccctggcatcccatcgaagtatacaacggagacaaccgcgacaagggggattgcacgcccgacaacaacaaattgccctaaatcggacggtggagacagcaacgtaccacggttggcattgcatcatccaatggtttgtcatggattccaccgcgcggttccctggttctccgtcaggggagttgtcctgataggtccacccccgatacatcatcgtccgggtccttgggtgacctatcagatcactgtgcctattgaacacaaccctaggaacattgcactacggggtacatttaatttaaatcacttcggattgtaaaagtgtgagattcaatccgattcagtcctgtggtgcttcagtaaatatcattcacacgttacggaggattcaacacatccaggcgtcaactgaaactgacgaattatgacacactgtccagccgccacatcaacagttacggagtaaaatggatcggatcggccagtcataggaatcatagtcacctccctttcaccggtgcgttccttacttctagactgggggcgttgttctagggccagaagaaagagggggcgtctgaaaccaacccctcctcccctcttcccccctgccgatcggttgccgaaaaacggccatgacaagccttgccggactacacgccggtgtttcttctggtccatcttgggattggcgcccacatccaatgttcctcccgttctccaggcatgtcctaattttgtagtcggttttgcttctacttgcttcgtactacctctcataatttgctatgtatgttctcccttgggatcatgactggggatgctcttattcccggctctcctataggctgtggggatatactcggtacacaagtacatatactccgtacctggcacagatttacatgccaagccgatttgaattttcattcatatcagggatttccctgtggtcctaactctaaatctctcaatcattctttgaatttcattgtactcgtactccgtactcccccgggctaatagttgccactatgtacatagcgagaatcacaatgatatcagactgcagtcacctccggctggacatacctccgcacccaagtacgcatgcctgtatctcatgtcaaagaccaagactgtggttctcctcatctgaaacagacccaatcccaccgatctctttgtggtcccgtcaacgtggaccgagactctaattttcagctcttcagggcactttctcggactatgaattccggactatgtcctccgcacggcgtatttttatcataataatttctccgaaaaaaagaaaagaaaagaaaatatgcccgtgaagttgttctggccgtgttggcaaagcaatgtggcttgtctcaatagactcgcttctagcccggttcccactttccctgccgacgctctgcccacgtcatcttactgcgcagagggcttgggcttgggcttgggcttgggcttgctggctttgtacgaagtacacatctacactctcggaaatgaacaaaggaggttcattaatcattacttaccaatctcgaatctcgctttggtctttgactcgagcccaaactgtcgtctcggcattctagctacttttgactagtgcccggactcaacaacgtggactatagaggaccatttttagattgtaacgcgtggtcttggtaggcactcatcgcactggccatatgtcggagtcgccggacagctcgatgacatgtttaggtagctatcgtcgctgatacgaagatgtctttaaagtatcgattattggtttcaggaagtgctgatcatgcatacctgtggttgatataacaagtctacctcgtgttctcatgggatttatcatttcactatcactatcttcggtttatcaaatatagaagcgacgcgatgcgagtctctatgttctcattatcaatggtgctggatatagcacatcatctgttgattttgggcaattatgcatactcgaatggcctctttatatcggcagtctcctcaaacacgaagctccatatgtattaggctttgttatggacctcattaactccagccagttgcctttatcatgtttggtacctgttacacgggtactcgaaagtgtataagcatttacggtggtgtatggaatttatgctaagacttctatgaaaattctgtgtagaccttcctgagattaagatcatcatcggaagacgaagtgctggagtaaatgtgatgagtatcatttataagtatcacatttcttctagcaacagctcacactcttcatcatgagagcaataaatttgaacatattctataattcctactttcttagagttactaaatgctgcagtctcagtggttattggtgacgaactatccacttgcacaacttacaagtgtatatcctcaatctagccacccctaactacctataactcaatataagcattcaacaagctaaaccatcatattgcacaagatctacagtccatttttacaaataaaatcccatccaacaactctcatctataccccatccaatcacaaatactgcccaaaacagcccaattaaagcaggcggtgaaccgcgatgatgtaaactatcccatcgcatcatcagaacagctccaaccttaatacctattccctcccacaccaatccaaaccggcccatacaacaatgctctcccgtacagctcctcgagctctgctcgcatccgtccgcccatccatccgcacaccagcacccaccaccacttcagccatcctcccccgggcctacgccatccgccccagctccgccgcacagttcacccgctcattccagtcgtcactggcaaaccgcaaaggcatccacccagaatccgcaaacccgccagctccaaacccgcagccgggcgttgccggcgctgcttcgcatatcactgagccgtcgccgttgacgccagaggagtactacgagtactcggagcattatttcaatgtgctgcagagcgagctggagaggctgcaggaggaggggtcggatgttgaggctgagtacagtgtatgtttctcccggtctttttctgtgtttattttgtttttcccggtctttttattttccttgatacaaacagaccttgtgttggcatgctatataaaatataaaaatggaaaaaactagctaactctcttcctccaggccggtgttttgaacatctccgttcccgcaatcggcacctacgtactcaataagcaaccacccaacaagcagatctggctcagctcgcccatctccgggccgaagcggtacgactggattgtcgagggcgattatatgcatgagaagcaggagtcgcggcctttcgtcaacgggcagtggatctatctgcgtgatgggtctaatctgaccgagttgttgaactccgagttgaccttgagtttgcccaaggatgtttacagtcaggtcattgagtgagagagttgtcttgctgggctatcgattacctagaaagaagagattcttgtcgttccagttttatttgggatgttgttacatattgtagtttagtgtctatgttatgatgtggttgcattgagatctttacgtgctgttcagttcttaatttgctagatggaggtgaataaatgagttggggacatagttgtgagtatcatttgagctacctgcactgggtgggtatatagtggttgtgtgtagcgggaatcaatgctgaggtgggaaaagtcatctcatcgccaattgaacgggtgtagcaaagtgctgttctttctctttgaatgaacccgacatgtacatagccaaatacagtctcaacccgatgaatgaagcggtgtcttgcctctccaattgattgtccaatgtagaactacaccagagacaaaatcaacggagcccgagtcaacattgaatgtgttgagcgaggtacgatgggtaccccagtgcggtcacagagaccgatatcccccgggatacaccgagtcacttggcaagattggaagatgcatagataacatccgcagcagaacatcgagcatgttcgcgcgatccagtgttcaaagcgaagtccggtggctcaaagccacccagacccggcgagacacatcatgccgtccagacgagcattcgcagccgggtagtggaacagcaaaatatcccaacccctcaaaccacttccgccaaaataattgcaagtggcaacgagccgactcagcagcatggaccgtctcttcgtctgagatagacccgatcatttcaagggtattcgcaaaatctccttcatctcgcactcaagcctgaacagccaccccgctcgtactctgcgtctcggctttaggaagatcagactgtgcataccccgcagggcaataattagccaaccgaacaaaataaagcgacatatatctagcttatataatagggaaacacaccaagtcgaagataacccggatcatcagactgcaactcggacacacggcgatctcttcgccgtcgcgcaagtcgtcgattgcgatctcgaagcggtcgccacatgggcagggatatgtgtagatctggatattcgggtcgaaggtcatgtcttcgatctcgatctcgtcgtagatgttcagtccgtcgtcggccattttggaggattatcgcgtatgtgcaaggagagatgtggcgaatgagtggatagatcttgtgccgttgactctttcgggcagaaaaactttggcgcggtcatgtgatgcgcggggttaaggcagggtatccccgggtttaagacttggcgggggctgatgaatgaactgtgaactttcgtcttaactcaattgtgtatatactcggggggttgtgaatcgggattggatgcactggctcctgccattttgggcatgccatctccaaatatgcagcttcgatacccaaacaaatacagccttagtccagtcggtaggctgcacaatcacaaaggtcattacaggtgccaacaaaagaaatgatttgagctgaaagagatggccatgggttaggcaaggagcatgcatacccacctccatccaatcgtccgcctgaggatttgtctgctctaccaaacagacccctgcgatggttcttctggcttgtcaaatactaaattcaaacatagatgatgttgcagcatgtgacagcaagaatgccgcgatggagggtagccgggaaaacagccaggttgacgatggattaggacctcggtgtgttctctatggctgctggcaattgggcttggggctgtaaggaagaagtgagttaaaaccagcactgcatcaagccgtatcttcattataccatgtaccacctagtgtacagttgtagctcatttctctaatcgtgcaatttccatctttacttcttcaatctccctcgctaaaaccccatagcgacgagcaatatccgggaaagtcccttcatccgcatcgatatcaaccggatcagacacctcgacatcgccataatctctcaactcttgaatcgtcatcttccgacggtgctgcaggcgctccttcgtctgcctgagatgctgcctataccgagcaagagcagcgagtgtttccggcgtatacagcgtagccgcaatctccagttttgtaaccctgtcgaaatcattaaacaaactccaccagaaagacaacagcaagacttgaaagctggaaaggcagaacttactctaatttcccctccacgccttgcgccagcacagccaaatgctctgccttggctttcgtcgcgcgcgccagagccccatgcttcgcccgctccagggtcacaaccgtgcgctccaaaacccgcgcccgcgcagcaacaacctccgcagctgtagcagccatattccgccgagcaaccggcagctcggacagctgtgtgtggcgcagcgcacgtacccgcgcctgcagctgtgacgagagcaatgggaccggcgccatcgacgtccggactcggcgatcgcgtgcccgggcacgtgcgatgtggttcgcgtgtgtggttggagcgtctgcgtcgggcgcggtggctggatctgtgtttacggctgatagagctcgtaggtcttgaacggcagatgagatgtttttggagagtggttggatgaaggctgggatgttggcgtagaaggcttcaatgtccggtgctaggagggtgagtacttcgtctggtttcttgagttcggtttctggctttggggtggtgggttcgattgcgctcgatggagtctctaggtagagggtgattatggccaggttatcgtggcactagatttggtatgtttgttagggatgtggtttcttcttggtgggggttgtactgacctccgccgggaggttggtgtctggggcgaaggccaattgccggagcatttgttccttgattcgctttttggcattttgagtctggcattgcttcagctcctaatgatagtgtcgtcagagctctgttcgtgcttaagtccgttaggtatgtgctgcatagcgcgtcgaccacttacttccaccacagctgtacgggctgggctcgcgctttgagcacgcgttgaggcatctgaattgaggagcgaggttgttagattctcatatagtcgtttaaattgaggattgtgctcaagaattgaggggtcacagggaggaagcatgttgatgttgcaaagaaactggccaagttcaccgccgaagaagacccgacgcgtcagcgccacatagacagtaaggaaagaaattcgcaatacaagatcgtacattcaactacatacctaatccatgttagatggtttaccattacaagtacatattcattttgcatttccgcgtttctttcataatcatacaagttgaagccaaagcttcggttcacctcttccaaccgcaacgtcgtcggggaaatagagcaacctcatccacctatcctggctgtgaaccgaaacgggaaaagcgtacactgaggcgtaggggaagggaaattcaaggggatgagtgaataaaatcctgttcggccaatcttgagcataaggttcgtcggtggcagagaaaccttgccgggtgcaggggtattcgagatcaaagtatgtacagacgttgctggcggggattgcgtagcgcattgcaagcagcccgtcaggatccagcggtgtgactgaaaaagaaagatgtagcgagaaattgttcagaaaggcactgagagaaaacgacgcttggaacgcgagggtggagggccatcccgtatggaaaaaattggcgggattgagtccgaagagtacatttactcctcctcgctctcttcttcagacgaatcagattcgtcatcgctgctttcgttgcgttcaaccgaggccactggatcaggagagtgagcgccaccctggaaacgagaaaggttgctctggagcatgttgatctgagcctcctgctcgaacttgctcattggcttgttcttcttgggcttgggaggtgccacactgctcgcaggaagatcgtcttcgtcttcatcatccatgagattcggcacgtgcttcttcacgaagttgagcaacttcagcaagacatcgttagggagctcgtcgatgtccaactcaatttcagcctcgtcggtaccctaaatctggattagaactggtctgtatgtggtgaacgtataagaatcttaccttaagttgaggaacattgttctggataatctggagggcttgctgcatccttttatcgggaagactactgataccgttcgagataatctgcttctcgttgtaggtgatagcgcgggttttgcctggttgagagatcttgctcttcttgtccctctttccagaactgatcttcttggaatccttcttcgcaagcttcttcccaaccttcttggaggaaggaggtgtcttctttttcttattggtaatagcctcgacctggcgagacatctcggcaatttgcttctgaagcagcgtgagtttctcgtcatcttcctcgctctcttctgcatcctcgtcgctgtcttcatcggaagaatcagtgttctgctcggggtgtggttcatgcgcttcgaggtagtccgacttctgggcccactttgcgttgaagatttcctccgcacgctggccacagacgaaagtgggatcaccggggatattgaagcggtaacaattcttgaaaatgaggcggacatcgttttcgaactccctggcattctcgtactggccggtcttaagtttggattgggcggtcgacagatccatcggcttcttgatgacgctgtggtatgtgggaatgttcaaagcaacggggtccacgggataatagaaaggcatcacccagctgtagtgcttttgcttgtgcagctcatccaagacttcctggcaaaagcgcagttcccattggaacttcttcttctttggcttggtagaatacgggaggtcacgcttcggggggtggatagaccgcttggggcgaccatcggggttcgaagaatcgcggcggatgacgggcagaccttcgggtcctagcgcaaatgtctgagactggggagaggaagccttgggctggcttggcagagaagtccgaggctcccggcgagcagcagacgtcttctcagtgtgcttctttggctttcgctcttcaacctcttcgggcttgggaaggttagtcatctgcttttcaaatgtcgccttcagcttgattccctcttgggtgaccaggtggtctgcgccattgaagacggtggtattattgaccatcagtgcaaagtcatctgcgactgcctggggggacgaatattggttgttcttgagcttcctttccatagttcctagatccatgggttgggtgataatagtgtggtattgggggatgttcaacttgatagcatccacaggttccttgtagaaacgcgcatcgtgcatgcgcttaaggcttgtaaggctcttcaaaatgaacttatgctgcatcttcgtgagccctggtccgccaccagtgcgggttggaccaggtgttgcagcagctggcgagctgtatcccggtgtctggaagttaataactgactcgtcgccctcgaccttggtccgcttaggagctggttcttcgctgagatcagcatcccgttgccgggaaaccttggaaggagatggcggggcctctgacccgtctttcatctcttggtcaacgtgttgcggcgcggtgagcacaggtgggagcgcaggtggtgcaggggccgtggtagggtgatgagggaggtcggttttcacggcagtcgaaacatcttgaggggtatcgataaccattggctcgggtgtgtcactaggaccatctgtcgatgcaggaaatgtggaaacgtgcgccgcaggctgtggggcggacacagcggcactttcagccgcggtgcttgctggagcaggagtggtagatacctggccctgtggaaggacgttcttgtcttcggtcggctgtgcctctgcgggtggagcagatcccgcggcagatggcgtcttgttttgatccactcctggagaggtttggtgctcgggggatttaggcggtgaggtagcaacgattgttccattggtgtttgaaggctcgacgggagtgtggccattgagcgcaggcgatttaacctcggtatccgtgggaccatcacttttgagattcactgtggcattttgcgcgctgcacgccagtcagaacaagaacagagcagatataaagctgatgcgcttacctggtgggtggatagtcaggcgcagaaggaccagtgggcgaaggaggcaattgaggcttgtcctcctttgtaacaggaggagcctcgggaggcggagtcgccattagggtcgcgttggataaacaagaatacaagctagggaagggtgagatggttgaagatgtgagagttataggagagtgtttgaaaagctagtgatcaactgaaaacacccgtcagatctctgcgcgaatcaatcttgccgcgtcacaatctcgagtgaacaaacactagcggcaaccaaagccacgtagtacggactcaatagttgatgaggtttgatatcacacgtgtgggcgcgaataaaacgcgacgggcggggggatagtgaggtcagagatgatcgagagataggaagagtggagaatgcgatcggagacaggtatttatactgccaagaaggcggtatggaagcgttcacgtgacgtagtagaattgacgccaggtctagatgacttggtacagcaagatatggagctaagaacttcccgtgaatgactgcctgaggccaatattgataaaagcgaattatgaaaataaaataatgaaaaaagaaataaaaaaagaattcggggtctgagggcggttaaaaggaaatagcaccgggtgacgcgagacgcgtttgttatgggcagggcggtcagcgaaataaaaataggagaaaccaggacggaagcagaaaaatggtcgggaggggatgccagaatccttaagtacaaacggccgccttgcacgcagttccaccagccacactaatcccgattctctgaccttcttaccccttgattggttctatacccctggccctttttccttttcttcttttcttttcttttgggaacttttcccttttcttatatatgaaggtgaatatactgttgaatatctttttcaaaacactgtttctttttggttttcttcttcggcttttctatacagttctcataaccttgaaagtcggtgggcgcatatctcggatgactcaaagccctagggttttggctaaatccggcttaggccgggcggatgggagtctgagtcacgtcaccactccatctttcacgtgactatatcatgatgagtacacgtattgtaattgataagaaatagcatccttctataacaagtactgagtactccgtattcggcgcaaggtaaaaacttgaatattgaatatccagatatcgtagagtagagtagctcactactatttgctgccaataatcctagaaattacaatcagcactttgcatttacatactacctacggagagcgtaactatgtacatacataccggataatgcctggcactcaagacctttccctttccgttttagtgctcacctcttgccgctttttgatcactgagtaaaactgagcacgtccctgagtatcctgacttgatcacgggccattatataatcaacgtgatctgctcactgagcatcacctgattatcccctgagccccctgatccactcactgatcatcatctgagcaccctgatttgcttactgagtgctctctgagtgtacggctgagcggcctgagtaagctacatcaataaattgcgacacgctaatcccatcacgtgcaaccctttccatttagatcgcccatcaaaaaaggactggcgcagtcaacgtgacccttcatcctagcggtctcgaccctatccaagtgaaaacctcgcagtggggctattcaattgacccatcattttcccattccagcctatgctcctgggaataccctcggaatacttcgcttaccagcccggcgatcctctaatcgggctttggactactaccagggcgagggcgattggacgaatttccttgattagagcccttccctgtatcaagacaactagagtaataagtgtttagcaggtgacgatgatgaactacttctctcgctaatgagcgtgtaagtcgaaggcgtttctgagcgtataacgtcatgtctttcgcgctatttctaagtaggtcgtaaaccgaagacaaaccatcaacagtaatacccagatgagctcctgggagcccgcgggctcnnnnnnnnnnnnnnnnnnnnnnnnnnnnnnnnnnnnnnnnnnnnnnnnnnnnnnnnnnnnnnnnnnnnnnnnnnnnnnnnnnnnnnnnnnnnnnnnnnnnnnnnnnnnnnnnnnnnnnnnnnnnnnnnnnnnnnnnnnnnnnnnnnnnnnnnnnnnnnnnnnnnnnnnnnnnnnnnnnnnnnnnnnnnnnnnnnnnnnnnnnnnnnnnnnnnnnnnnnnnnnnnnnnnnnnnnnnnnnnnnnnnnnnnnnnnnnnnnnnnnnnnnnnnnnnnnnnnnnnnnnnnnnnnnnnnnnnnnnnnnnnnnnnnnnnnnnnnnnnnnnnnnnnnnnnnnnnnnnnnnnnnnnnnnnnnnnnnnnnnnnnnnnnnnnnnnnnnnnnnnnnnnnnnnnnnnnnnnnnnnnnnnnnnnnnnnnnnnnnnnnnnnnnnnnnnnnnnnnnnnnnnnnnnnnnnnnnnnnnnnnngcccgcgggctcccaggagctcatctgggtattactagggttctaaaggttcatagctatttcgttctaatcctaggaattctaagcctcgcccgtttggcctagcatttctgcctaaagtgatgccatttcaaaggggaatatatatgcctagtcacttactccgaaaacaatggtcttcatcattcctctgcatccaagttacttaaccaaaacaaaaagcctgcttttgaatatatcacagtgagttcagccttcattcactcgtcgttctgcatcaactgaccgtactccagattggcatctcttttgcttacgatagtcgaatcgatcaacattgtcagcctccacgcccacgcaaaatctggaagctaccaaaagtacaaccgaggctttaacaacaggactgtgccatcggttgaaccttcgctgacattgcttcagggagactgtcatcagcattggatcaatcggaagctagcaagctcggtcatggatcccaacatcatcttcggttggcaatccggagcaacggagatgcaggtgttagattccaggacactttcagagaatggactaaacactcggccagcgatactatgcacgaaccggactgacatcgtcttgatttcttttggaacataaaagtgcgactattgacagagcggctgcacacgtttgaaaataccacatatacgacgatagaactctctgcgtcgtatgtaaaagctctcaacattacaacactcggctaactggatcactatactagacatgctatttttctcacctctaagagcatcttcaataaggagagaaacgcagtattgaccacggaaatgaaatattgttgcagttgttgaaacaaataagtggcaacatataattcagaacaggcggctggcactccagcgcatcactcatgaggccgaaggtcaggccatagggatacaaaagtccttccttgagaccttgagaggggccatatccgtacttgaggcctcccttaaactttaagtctcgtgttcttcagtcgagtaagacctacggacgcttgctcctcccacattataggtggaccaacgggttcaatagtatggttcgagaggctcacgagcttggcagcttaatagtgggcttttacagtatgagctccggctcccaaaagggcccagacttgcagcgtcactttccccaagggggagcggaaatatggtgcgaatgcgtatgaagatggaaaagagccgttcttccctcgcctttgagaagatacatgatatttctggtgtgcatcttctcagtttgtatcatttcatgctgacttacagacaccgctctgaactgtcagatggacccagctttccctcatcttggaatagtgctggtccccagtaaaaagcttgggtgaaatacggaggacgcctccaatgggacgaacgcacggtatctgggtccttgatcgatttagatctaagacagtagaagggcccctccccatgctcctcagcctaccagctccgttctagaaccccaaacacgaggctggcggatcctcgggcattttgtcgccgataacatgccctgagcacgtcagatttatatgacagttccagtaacgattgttcctggaccagcggtcaatacgtgatttcataccttcagcaactccatttcctctgaaggcctgttttggcgttttgcaatggaatttgttaagattggaatcatgaccggagacgatttgaatgcttttaccgtggttggataataccatttcattaattagcttggttatgggtgtttggttccgtatttgatacatgtcgtcaatgtttctctccgtaaggtattacggctcttctggtcaatctgcacagccaccatcgcgagacagatcagccacaatgtctgtaagtctcgtaattgttgagtttactgaaacagaaatatttttgtaatataccgtcattgtacagtttccgccatccctgccttttccacttttagctgacaccaatttggtatcctcgggcagaccaatggaatgtaaataaacttaagtaagtgtcgcacaaaaacttatcggatttattgatttattgatgggaggctagtatttatgcgcccattactcgcatttgaaagaaaggccttggctacaatccaaaatcacctgcaacaggactaggcgaaaagaacagacatcgctactacgcatgaaaccaataggaagtcttgattcttcgatcctatcttgatacagattagcgcaccgagagagtatggttcgaaaagcagcataagagcacagagataagatctacctcgaaagtactagacatcaaattggaattcaggtgaactagtactgagccagatgcgaatctcctccaaggcatttaggtcattctagaaaagagaatgctgtaccttctcatcgtacaattcgtaagtatggcatcttctaggctctctcatacactccggcaagaaccaaaatcaatgaaaattgtccgatgattatcaatcattatgttgcttggatgacgtcgttatgaaccaacccaagcggatgaagatgcttgaccccactctcgatgcccgtgagaacacaactatagtccgtcacttgccgcgtgcttctcagtattctcttcatgaggccgcgtgggttggcctctttcatcagcatgtgagggtatatctcaaggcaaaaggcccgtgattgtgccgtcagaaacctgacaaccgagatatgtagcaatgttgggacatgggtgccgccttaagagtttcgttaaattcttgcttccttgaggtcctctgcaatcgagtcaggtcgaggtccttgactgattcgatcgtaactgatcaattgaggctttttgacaaagtaattgttcggcagggtttgaggtgctggcgtaaactcagtagaaaattttggattgtaggctgagctaggaatttggataatattttcaaaattctctggctttcagcatcgcgtggtacaaatcccccttcatctgatacacaacgagggtacctgcgaaatggaagccttcaagccttcatctgagtcttcgtagacctcgtttctctccagcacctccagttgttggttaggatttggttgggtcgacatcgctcgagtgcactttgccgtgtcaatcattgagacaccaaatggcagatatgcactcacctagtaaacgtgcacgggaggagggtcaattagactatgaagcggcggaggtgtgaaaaagcgactgaaagattcgaaaggccaaacggcgtatgccatcgtcaaggaacgcaaccatgggcatgtcagggcttattcgtgaagcttctagggctcagctactttatagaaagatatttcatttgatgctataccaggctttgagcttctttgtgtacagcgatcaggttctctaagtgcaatatgggactgtaacagcagatttttctccgtgacctgttacctactgctcatcattctctagtgatggctaccaagaacaaagttgaagagcccatccctgatccagggaatctccagtgctacgggcttgtgctaatgctacttaaactggaaagggatgcactactaaatggatattattaaattactcacccgtggcgcaagtctgcggtgctttaggcaccaaaacgctttagcctttcatgctagctttagacgactggtaattatcgaactacacgactacttgatggtttcacgagggcctagatcgccctcgtcagtactctaaataggttcagcctttctggatactatgcgataggcaagaccatcgtataggaggtggctcacccaacgatatctatcattctcgaggtcctaatttccacttctaaatcaaaacggctgtgcgatctcacttggataaaccatatacgatgctaatagttagcaacattccttttagtctagggagaatagaaattactccacttcccgctccatccatatctcaagcctgtttgcgcctatagctatggctattagaggtcacgtagtccttttggtgatcttaaagaggaaaatagacacaactacatgatcggtccctcgttaagaataggctctgtgggttataaccgtagtactaccttaattgatggcaacggtcatttgcttaggcattgcaagaaagccagacatcgcgagttagcaactcttttaactattggccatagtaaacagcgtggttaagagtggttaagaagagtggttaagaagagtggttaagaagagtggttaagaagagtgnnnnnnnnnnnnnnnnnnnnnnnnnnnnnnnnnnnnnnnnnnnnnnnnnnnnnnnnnnnnnnnnnnnnnnnnnnnnnnnnnnnnnnnnnnnnnnnnnnnnnnnnnnnnnnnnnnnnnnnnnnnnnnnnnnnnnnnnnnnnnnnnnnnnnnnnnnnnnnnnnnnnnnnnnnnnnnnnnnnnnnnnnnnnnnnnnnnnnnnnnnnnnnnnnnnnnnnnnnnnnnnnnnnnnnnnnnnnnnnnnnnnnnnnnnnnnnnnnnnnnnnnnnnnnnnnnnnnnnnnnnnnnnnnnnnnnnnnnnnnnnnnnnnnnnnnnnnnnnnnnnnnnnnnnnnnnnnnnnnnnnnnnnnnnnnnnnnnnnnnnnnnnnnnnnnnnnnnnnnnnnnnnnnnnnnnnnnnnnnnnnnnnnnnnnnnnnnnnnnnnnnnnnnnnnnnnnnnnnnnnnnnnnnnnnnnnnnnnnnnnnnnnnnnnnnnnnnnnnnnnnnnnnnnnnnnnnnnnnnnnnnnnnnnnnnnnnnnnnnnnnnnnnnnnnnnnnnnnnnnnnnnnnnnnnnnnnnnnnnnnnnnnnnnnnnnnnnnnnnnnnnnnnnnnnnnnnnnnnnnnnnnnnnnnnnnnnnnnnnnnnnnnnnnnnnnnnnnnnnnnnnnnnnnnnnnnnnnnnnnnnnnnnnnnnnnnnnnnnnnnnnnnnnnnnnnnnnnnnnnnnnnnnnnnnnnnnnnnnnnnnnnnnnnnnnnnnnnnnnnnnnnnnnnnnnnnnnnnnnnnnnnnnnnnnnnnnnnnnnnnnnnnnnnnnnnnnnnnnnnnnnnnnnnnnnnnnnnnnnnnnnnnnnnnnnnnnnnnnnnnnnnnnnnnnnnnnnnnnnnnnnnnnnnnnnnnnnnnnnnnnnnnnnnnnnnnnnnnnnnnnnnnnnnnnnnnnnnnnnnnnnnnnnnnnnnnnnnnnnnnnnnnnnnnnnnnnnnnnnnnnnnnnnnnnnnnnnnnnnnnnnnnnnnnnnnnnnnnnnnnnnnnnnnnnnnnnnnnnnnnnnnnnnnnnnnnnnnnnnnnnnnnnnnnnnnnnnnnnnnnnnnnnnnnnnnnnnnnnnnnnnnnnnnnnnnnnnnnnnnnnnnnnnnnnnnnnnnnnnnnnnnnnnnnnnnnnnnnnnnnnnnnnnnnnnnnnnnnnnnnnnnnnnnnnnnnnnnnnnnnnnnnnnnnnnnnnnnnnnnnnnnnnnnnnnnnnnnnnnnnnnnnnnnnnnnnnnnnnnnnnnnnnnnnnnnnnnnnnnnnnnnnnnnnnnnnnnnnnnnnnnnnnnnnnnnnnnnnnnnnnnnnnnnnnnnnnnnnnnnnnnnnnnnnnnnnnnnnnnnnnnnnnnnnnnnnnnnnnnnnnnnnnnnnnnnnnnnnnnnnnnnnnnnnnnnnnnnnnnnnnnnnnnnnnnnnnnnnnnnnnnnnnnnnnnnnnnnnnnnnnnnnnnnnnnnnnnnnnnnnnnnnnnnnnnnnnnnnnnnnnnnnnnnnnnnnnnnnnnnnnnnnnnnnnnnnnnnnnnnnnnnnnnnnnnnnnnnnnnnnnnnnnnnnnnnnnnnnnnnnnnnnnnnnnnnnnnnnnnnnnnnnnnnnnnnnnnnnnnnnnnnnnnnnnnnnnnnnnnnnnnnnnnnnnnnnnnnnnnnnnnnnnnnnnnnnnnnnnnnnnnnnnnnnnnnnnnnnnnnnnnnnnnnnnnnnnnnnnnnnnnnnnnnnnnnnnnnnnnnnnnnnnnnnnnnnnnnnnnnnnnnnnnnnnnnnnnnnnnnnnnnnnnnnnnnnnnnnnnnnnnnnnnnnnnnnnnnnnnnnnnnnnnnnnnnnnnnnnnnnnnnnnnnnnnnnnnnnnnnnnnnnnnnnnnnnnnnnnnnnnnnnnnnnnnnnnnnnnnnnnnnnnnnnnnnnnnnnnnnnnnnnnnnnnnnnnnnnnnnnnnnnnnnnnnnnnnnnnnnnnnnnnnnnnnnnnnnnnnnnnnnnnnnnnnnnnnnnnnnnnnnnnnnnnnnnnnnnnnnnnnnnnnnnnnnnnnnnnnnnnnnnnnnnnnnnnnnnnnnnnnnnnnnnnnnnnnnnnnnnnnnnnnnnnnnnnnnnnnnnnnnnnnnnnnnnnnnnnnnnnnnnnnnnnnnnnnnnnnnnnnnnnnnnnnnnnnnnnnnnnnnnnnnnnnnnnnnnnnnnnnnnnnnnnnnnnnnnnnnnnnnnnnnnnnnnnnnnnnnnnnnnnnnnnnnnnnnnnnnnnnnnnnnnnnnnnnnnnnnnnnnnnnnnnnnnnnnnnnnnnnnnnnnnnnnnnnnnnnnnnnnnnnnnnnnnnnnnnnnnnnnnnnnnnnnnnnnnnnnnnnnnnnnnnnnnnnnnnnnnnnnnnnnnnnnnnnnnnnnnnnnnnnnnnnnnnnnnnnnnnnnnnnnnnnnnnnnnnnnnnnnnnnnnnnnnnnnnnnnnnnnnnnnnnnnnnnnnnnnnnnnnnnnnnnnnnnnnnnnnnnnnnnnnnnnnnnnnnnnnnnnnnnnnnnnnnnnnnnnnnnnnnnnnnnnnnnnnnnnnnnnnnnnnnnnnnnnnnnnnnnnnnnnnnnnnnnnnnnnnnnnnnnnnnnnnnnnnnnnnnnnnnnnnnnnnnnnnnnnnnnnnnnnnnnnnnnnnnnnnnnnnnnnnnnnnnnnnnnnnnnnnnnnnnnnnnnnnnnnnnnnnnnnnnnnnnnnnnnnnnnnnnnnnnnnnnnnnnnnnnnnnnnnnnnnnnnnnnnnnnnnnnnnnnnnnnnnnnnnnnnnnnnnnnnnnnnnnnnnnnnnnnnnnnnnnnnnnnnnnnnnnnnnnnnnnnnnnnnnnnnnnnnnnnnnnnnnnnnnnnnnnnnnnnnnnnnnnnnnnnnnnnnnnnnnnnnnnnnnnnnnnnnnnnnnnnnnnnnnnnnnnnnnnnnnnnnnnnnnnnnnnnnnnnnnnnnnnnnnnnnnnnnnnnnnnnnnnnnnnnnnnnnnnnnnnnnnnnnnnnnnnnnnnnnnnnnnnnnnnnnnnnnnnnnnnnnnnnnnnnnnnnnnnnnnnnnnnnnnnnnnnnnnnnnnnnnnnnnnnnnnnnnnnnnnnnnnnnnnnnnnnnnnnnnnnnnnnnnnnnnnnnnnnnnnnnnnnnnnnnnnnnnnnnnnnnnnnnnnnnnnnnnnnnnnnnnnnnnnnnnnnnnnnnnnnnnnnnnnnnnnnnnnnnnnnnnnnnnnnnnnnnnnnnnnnnnnnnnnnnnnnnnnnnnnnnnnnnnnnnnnnnnnnnnnnnnnnnnnnnnnnnnnnnnnnnnnnnnnnnnnnnnnnnnnnnnnnnnnnnnnnnnnnnnnnnnnnnnnnnnnnnnnnnnnnnnnnnnnnnnnnnnnnnnnnnnnnnnnnnnnnnnnnnnnnnnnnnnnnnnnnnnnnnnnnnnnnnnnnnnnnnnnnnnnnnnnnnnnnnnnnnnnnnnnnnnnnnnnnnnnnnnnnnnnnnnnnnnnnnnnnnnnnnnnnnnnnnnnnnnnnnnnnnnnnnnnnnnnnnnnnnnnnnnnnnnnnnnnnnnnnnnnnnnnnnnnnnnnnnnnnnnnnnnnnnnngtggttaagaagagtggttaagaagagtggttaagaagagtggttaagaagagtggttaggaagagtggttaagaagagtggttaagaagagtggttaagaagagtggttaggaagcggttaagacctgaacgagagttgaaggttaatcggggaacgtttcgatgtaagtcttggtcatatccagcatttgctcaacgcatccgagcgactctctcattgaccgatttagcaaacaaacctcagggcgcactattttgagccctaggcggtccggtccaccttccagcgacgagaaaagttgattgcaccatctaggaatgttggcattgtgaaaacttctgcataaaagcccaggccgatacataaatctgcggtgtacaactactcttcattctcacgagcccggcaacgaagatatagaatcataaaacgacaatacttgctctctcttttggcaaccgatcattggcggaacaatacccggcaccctcgtgtgatgaaggtagcaacttagccaagcgcacgcatgtgagtctggaaactaaggtggtagcttgccgtgtactgctgtattgacattctgatgtcatgctctgctttcaaatgcgatttttgcccgagatgaagcgtcctgcggcggacgagtgtgttgtaattgaaaagtcattccattattcggatagccgcctgcgaaagctccgatactatgtaacttaggatggcttcgtgcgtggggaaaacactgcgcgcaaataccgggaaccaaaattgtacagctgcttttagtttttatcttccgcaacagagctttgaagatcaacacatggtaagaagtagtcaggatcgtttcaaatccagtcaggagagattttgggcttgtattctagagttcattcataatcgggtttttctggcttatatatctttcaatccgcgcaaggttcctctgaccatgccttcgcgatgagtccctgacattttgatcaatggaactgtcgtatacgcgaaacaacctgagacgccaatgcgcatacatggacaatgatcatcaaggactaatcacaagcaaggttgattcccatgcggctaattcaaacgctgtcacagacctaggcttgaagccattatagtacacacggaggttgcctctgccaacagaaccatagactctgggaggcagtgggatgtttggagatcagatgagtctgcgccttagctgcagcaacccctggtcgtttgtagccaatcaaaccagtacccggcagagcaaaatgcatcccaggagctttggtattatctttaccacgaaaaaaaaaacctaggcagctagcattaaccagccaatcaaacaaagtatagactgagaaatgctaccttctgtgaatctatcctaggagcatttgtatcatgcaaagaccggggtaaattggccaatggttcatcacactatgcacgaaccttgattcgtaagtagctcttggcactttcctggcactcttctggcactcttctggcacttgctcttcaacccttcagaatgtcatccaacctacctctaacaggcttgatatatggatcgagcggaaaatggagtaacttctattctccctagactaaaaggaatgttgctaactatagcatcgtatatgctttgtccaagtagaatgcacatttactacctcggcgccgaaaccggattggaatgatttcacgtttcagaagtcagtttgcagcatgtattcaaaccgttgctggatatttgtcccgcgaggtatcgatgagaacgcatacagccggaataatatctagaaagtcgggtcaatattgatgtcaaaagatataatcaagcatagaagcaagaccatagctgcagcatccccctctgtccatgaatgctcgtcaataactactatcacccacatatacccgaccagatagttcctataccctgcgcttaccacggacttacatagatcccaccaacgccgggattagacgcccagaaactgccaagtgtcccgcccagaccttcggccagtagaaccccgcgaatggccctctcggcatatagcagtaagatgagcgagttctcatacggctcgtatccaattgcattagcgcacggcgttgcagtgccttaaagcaggacggtcgtcccaacaatctcgcagagtaactcctccacttcacctcaggcaataggctttccacgcctcatctcacaggaaagatgaacagcatcaaagcccgattcaagaggatgtcaataggtcggaccgggaaggatcccaatgcaagtggaaagacagacgccgcagcctcggcagagaggacgccaaacgaaggccggaagaatgcgccagccaattccaatgccgcgaatgttgacagtggtctcgctgccgcgcggatgttcatcaaagacgaacgggagggcagtttggtgtttaccatccaggttgcgaccgcttatcgcccgcgcatcgcggtggatgtgcatcggtttggcaaggaacaaggggacgggccatatggaaagctggccggcttgatgaagatgtcgggggcggagcacgggttcgtggaggcggagcatccgtcgtttggttggagatcagatgagtctgcgccttagctgcagcaacccctggtcgtttgtagccaattaaaccagtaccgacccggcagagcataaatgcatcctaggagcttttggtattatcttaccacgaaataaaaaaattagaaaaaaataggcagcagcataggctggctctggggctgattccgtttgtggtcaacgaaaaaattagcagagaataattgctttttgtaaaacgtccaacgctgaacatatttaggtgccgcagtttcctgccgcagcatgtccgtattggcgcaaatcccaacgtgtacggccccaagagcttcagccaccattccatccccccgcaggagcgtggtttctattgtagccaataataacggaccgaaatgccaagcccaatcaaagagcggtgtctgtcgtgtccttcgtgtctgtcgtgtccatcgtgtccatcccgtcgtgtccgtctgtcgtgtctgtcgtgcccatcgtgtccatcgtgtccacaaactcatcgcggcaaatatgaacaaattcgctccaatatacgaaaaacacaaagatattggtgcagaacaaaccattcccgaagccgacatctcactatttgaagaacgcttggtcatagtttgcacagtcgacgagacacaaaaccacaggcgtgtgagaataccaaaccgtgtgaaactcatccgatctcgagagcggaaggctcaaaggctttatctgaaaatcctcgagaagtttcctggcatttttctcgctttcatcctctcagtctccccgagagcttctgtagattttgacctttcggccttttgtgagcaacacactgaacaacctattgttctctgcgacaatgctgaatcgcttctttggcgaagtgccatcagacacggtattgagaagtctaaagctttcggaaagttgatgagtctacttttcagcttgcctcgcccagcgacagaagccgaaggggaagaaagttgttcgttatctctgagccgtctttctgtgatccgcatcgcttttggtgatataatatgtgaggcagttgaatgttctcccactcatcttccaatgaatgcggacagcgattatgcagaaataacacagtgtgtcaggacgacagtattctataaccaccaggacaccatcattcatattgatgtgggctgcgcggtcaagctcgctgacatgctcttcccttctgcaagcagaagaatcaattctgctctctcccagtccaatgccagcattcaggcgcggaacccaaaggctgtcttgctcccagggatgcaatcagaatcactggttcaagattacggtacgaaagagtggcgttccatgacaatgcagtgtattaattagccctacagatttcgcatacttcacgttgcgtggtgcgtctgttgccggcataagatcggtgttcagtgcctccatctgtgaagctatagaggagagcgaattgaggagatgggaaaagcaccatctgcttactgaagttacagactgtatcacgatgcagctatggagagcagaatcacaacgtggtctcattaaattgcgagttggatactatacaggagtcaatttggcaaacaaactttatgcagaaccccgttcatgcatcgcttcttgaatcgggccgtcaatctatttcggtgcaccttgcttttccttttcttatccaagctccaacgttctctggaagaacaattgcgccactcccctttgtctcgcatatcttctcccctccttgtttctgaaatcttatatactcgcattccaagcaatataaatttcttgggaaaggttgcggctcgatatcggtaattggaagggctctgtattttgagaggcggtcgacttcttccttgggaagctccttccactcggcctgagataggcgctcgctctgggataggtcagaccatacatcctagaaggcatattgtagcgactcaccaaggacttttctgtgattgaatctgccatcttcagcgaatgtttgagcaagaaaagggtttgcttgcgcgacacgtcttggatctcttcggtcgagatgggagtaactctcaccgcaagattttgaggtgggcgtgaacgcaggaaaagtatgccacaaatttttgcccagattgaatagcctctgaggaatataaaatataaagacgagactgggcacgaagaatgaaccttgggaatcaaccgcgggttaggcatcggctgaaaattgcccaactctgcccctcattcttcttgcacaatggtggggccaccttgtggctccggaaatcgccacccacacgtgactcgcaattctccggcaatgcgtaatgacattaaccgagatccattcgatcgaggagatagagtttcaaaacagctaaggtgtccaaggtgtccaaggtgtccatcgtgtccatcgtgtccatcgtgtccgaggatcgccatgatggagactttagcttgtgccgcagcccaggctctggtagtatttctactttgactgagcttgatccccatttacctacctggcgttccttgccttctcggcaccacaaaaagattgctgcaaaatctagtttaataagtcgtaataatctaatttgtacttgatgaccatttctaacattcctaatttctatatagatggatccatggcagacatcatagattggcaacttataccgatctacgacaactactttcatgcctctatgtccacgaataaatgacatattgaaataactgcatctcaaccgttatataagtcatccccaagctattctgcaggctgtagggggacaatatccatgatcacatgcaaaactgcaaagacccagatacgagtcgtcttcgccgataagaggcgccccacgagctccagttgatggtggaagcgggattggagttccatactgcgtacaagtgcagggtccagatggacaataaccatagctgcaacaaaacgaacacaacccgctgtagttgctggctcctgttcctgcaatgcaggccctattcctaccaccaccccctcctcctccgcccccgccgccgcctccacctccagcatttccaccgccagttccacctccgccgcaagttcgggttggaggtgaacttggtggagttatagcctcggtaactgtcacagtgacaacagttgacgaaatagcagagcatggtccaggggcttttgttgtgcccggaggagaacttggcaatatggtgctcttacttggagatggagcaggtgggggtactgtacttaatgagggggtaggttgacatgtccggacacgcaggccctgtgtgaaggcagagagcccttctggctggagggcatcattggatcctggtggaagcgttccgactgcacgtcaaagttaaaagggggctatcagcagtgctatatcttcacttaccgtaggcgttgaagttatacaaaccacacacgcacccgtcgataacctccttcaaactggtccctgacagaatggtctcgccgtcgcgattgacctcaaagctttgtgtaccaactcccattggcacctcctttgcacttgccccggctggcgcttcgtaattatggatagtcccgccgctgttgacctgcactgtggctggggctgtaagcaatgatacaatgaagacagagtcggccatgaattcccagccatctggacgacccatgaaatagttcccactgccattgttcgctggtaccatgcaggtgtctgtagagtcgcagttcaccccacgtggtgcaggtcggtaccagtagactaactcatcagatgatatatgactgtctggagacgactggtctgctttgaacgcggcgatgtacggttttgaaatgtccagccatccttcgtggggcctgtagttatacattactttggctcccgttttgaaggtttccacgggtggatttgaagttctcacatgtcgttaacccatttagaggccccgtcgtcagtgtgcggtgatcccaaaggaccaatataatgagactctccatagtcattccatgttacaatctcgataaatcgcggtttcaactcaagaatctcattccatctgttaaaccacaggagatcagacgggaagttccagtttttgctataagaaacttcgggtccgaaatgcgtggaaaaccacggggaaacagctgcgtcaaagtcagaaaaattaattcaaatttggatgaaaactaaactgacgggcaatataggccttccgccaagagcatcgacatattccctatcaccgtcggcgacagaaatactctgctctgcagttggggctttgttctttccgttgtttggccacgccatccaattcaagaggccgtcaactggcgagatatctgtcccagttgatgggtggaaattcggtgcgaaaaagaccggtcttccaactgctgctcgcattgctgcaacattcattccatcaccagcgaatgatgaaacgaataccttgtcatcgacgagaagttgtgcaggtttgctagcatactgggcaaccttctggccaacttcggcggcctgttcaatatgccaccagttgaaatcaaatgatagaaaggctttcatgtcattgttggcggctgagtcgtatgccagttgaagttgttgatcagtacagggatctgtgccaatgttcagagcaaacgcatcaatgcctagagacttagcccgtttcatgtcgtcatcgtagtccgatgcgctgtttctattgctgacgattccaatcttttaaataatcagtatatgttcaacagacacaaggaacttgagggcatatttaccataaagtgtgcaaagaccagtcggtctgtcgattgtcttttgacacgacgtatgccatgattccccgtagacagtgcatgaactatagtggatagtaaagtaataacacacaaaatgaaccgcatattcatcatgatttgtaagttcacttagttcatcttgggtcaatcttcaggattctggtttaggtatccatatgtgtgttgtgcgcgttccacgcctttaaatagtcctttcattctccagatgacgcggagcttctcgctgctgacctacgaagcttaaatatcaggatgatgagtgtgatatttgatagttatctctccgagcccgatcaaagccttacattcagggaaccatgtggttgttacagagctttgggcgacatcatcgttgagtgggaacgctattgcccacaagttctcgttattgcgcggttttccgcttcaattaggtacagggtggccgccggatgattccttgcgtagtagtggttgtttaattctatatagttatacatgccggtgaccgtacacaaatcaaaaggtaggaaatggtagaagccgtagaacatctaagcccttgtgattcgacatgagcgtaggggtcgatggatagttctgctgggcttttaggattacactgccatttttccggaactgcatccgtgtctgccattcaaaaaaattgtgtagtttgttggtgccagaatcaagaacactattcagaaaagccatcaaattacaccttgtactaaccacctcgtcatttagcctttgcccttataaatatattccgtgcagatggattcatggaaaacttggggcaagataaccattgaagcctttacataaatgtcaaataatccacacaagtgacaatcaacttcacttggttctagatgcagccccaatccattagtgctcaaatctccgcctgtctggcgcatttgatctagtgtagtacaaattttcttcatcttgcttgaagtacgctgaaaacttaattcctgtaaaaataaagcggttgggtcgcttttcagtagcagattcgcgcccattgatccgggtcttcagagttgagacaggtatctcaaaaggtcgtgcagcagcagctgcagggggatatttgccattttgtatagcttgtatggctaatagaaggcgaccctcctgctctatcaaattttctttcttatcggggcgtttgggggggggnnnnnnnnnnnnnnnnnnnnnnnnnnnnnnnnnnnnnnnnnnnnnnnnnnnnnnnnnnnnnnnnnnnnnnnnnnnnnnnnnnnnnnnnnnnnnnnnnnnnnnnnnnnnnnnnnnnnnnnnnnnnnnnnnnnnnnnnnnnnnnnnnnnnnnnnnnnnnnnnnnnnnnnnnnnnnnnnnnnnnnnnnnnnnnnnnnnnnnnnnnnnnnnnnnnnnnnnnnnnnnnnnnnnnnnnnnnnnnnnnnnnnnnnnnnnnnnnnnnnnnnnnnnnnnnnnnnnnnnnnnnnnnnnnnnnnnnnnnnnnnnnnnnnnnnnnnnnnnnnnnnnnnnnnnnnnnnnnnnnnnnnnnnnnnnnnnnnnnnnnnnnnnnnnnnnnnnnnnnnnnnnnnnnnnnnnnnnnnnnnnnnnnnnnnnnnnnnnnnnnnnnnnnnnnnnnnnnnnnnnnnnnnnnnnnnnnnnnnnnnnnnnnnnnnnnnnnnnnnnnnnnnnnnnnnnnnnnnnnnnnnnnnnnnnnnnnnnnnnnnnnnnnnnnnnnnnnnnnnnnnnnnnnnnnnnnnnnnnnnnnnnnnnnnnnnnnnnnnnnnnnnnnnnnnnnnnnnnnnnnnnnnnnnnnnnnnnnnnnnnnnnnnnnnnnnnnnnnnnnnnnnnnnnnnnnnnnnnnnnnnnnnnnnnnnnnnnnnnnnnnnnnnnnnnnnnnnnnnnnnnnnnnnnnnnnnnnnnnnnnnnnnnnnnnnnnnnnnnnnnnnnnnnnnnnnnnnnnnnnnnnnnnnnnnnnnnnnnnnnnnnnnnnnnnnnnnnnnnnnnnnnnnnnnnnnnnnnnnnnnnnnnnnnnnnnnnnnnnnnnnnnnnnnnnnnnnnnnnnnnnnnnnnnnnnnnnnnnnnnnnnnnnnnnnnnnnnnnnnnnnnnnnnnnnnnnnnnnnnnnnnnnnnnnnnnnnnnnnnnnnnnnnnnnnnnnnnnnnnnnnnnnnnnnnnnnnnnnnnnnnnnnnnnnnnnnnnnnnnnnnnnnnnnnnnnnnnnnnnnnnnnnnnnnnnnnnnnnnnnnnnnnnnnnnnnnnnnnnnnnnnnnnnnnnnnnnnnnnnnnnnnnnnnnnnnnnnnnnnnnnnnnnnnnnnnnnnnnnnnnnnnnnnnnnnnnnnnnnnnnnnnnnnnnnnnnnnnnnnnnnnnnnnnnnnnnnnnnnnnnnnnnnnnnnnnnnnnnnnnnnnnnnnnnnnnnnnnnnnnnnnnnnnnnnnnnnnnnnnnnnnnnnnnnnnnnnnnnnnnnnnnnnnnnnnnnnnnnnnnnnnnnnnnnnnnnnnnnnnnnnnnnnnnnnnnnnnnnnnnnnnnnnnnnnnnnnnnnnnnnnnnnnnnnnnnnnnnnnnnnnnnnnnnnnnnnnnnnnnnnnnnnnnnnnnnnnnnnnnnnnnnnnnnnnnnnnnnnnnnnnnnnnnnnnnnnnnnnnnnnnnnnnnnnnnnnnnnnnnnnnnnnnnnnnnnnnnnnnnnnnnnnnnnnnnnnnnnnnggcgggcgcattgttgttgtggcattgatctctttccatggtgcgttcttcagaagaagtcgtccctgttgcttcggggctgaccacggtgcatcgaacacagtctcaatcgcacggtgatccgagccgtgctctgtcccatgtatctcgagatagagaggcagagggttggctacttcctacagtgcttacgcagtgcttacggggcagcttccgtgttgccttggttctggttcgcccactggagaaagggtttggggtcaagggtttgagagcagaaagagccatcggagcagcaattgcaaaggaagctcacataggtaaacgggcggtacctcaatcattataccgaaacggtggagcttatgactcactggagttcgaaataatgtagtaagggactatgcaatcgaatgggtaaaaattatggtttggagctctggaaagtgcttttctatctcataggcttgtatatacagtaacatttcaagtaacacctacacccaaccaccgtaagtgcttggcttgcagccaattccacgaaacagctcactgaaatgcgagatgggcaatggcggttcaaacaggaaactcacgcgggttggcgtgtacaatgcgtgagttgtggttttctaggaaaggtgttgcgtcaaatccgttgacattgtggagatccgctaactgtgcagcaagaggttcatctccttggggccacctgattaaaacccagtccggccttttcccgtgctgccgaagtacgaagactggcaaaatggtcttagctttgtgcgctgtgccgaaatcataatcatgatgattgatgtcgatgacaataaaggtacgttcactccacacgtctatggcaagcaagagaatgcggggatcgctttcccagtccggaaaaacctcgctgacaactgtgtttgctgaagcacgatagtcttggggatccaaactttcggttttcactttgatgacaattcgttttgcaatgtcgatttcgaggatttcttttcgtatatcagataggttggccattattactatgcaatctcgggtctggtgttcgaactgggcgatatagtatgagaaagttcagaaaagcaatttgtgaaagtcaggtagagatttggagacgaacaattattgcgtatggtaaatgaatgaagttacacgaccattcctttttatggctgggatcacttattaatacgctaatcctgaacgggtaagtaatgccggagaaacgccccttaccttaccaagggtcttgctacgtattaaggcaacctatccgatgaaggaaaatgggggtacatacaaggttagtgttgcccatagagaaagacttataatcacgtgttttcttgttacttcatacaactaaatacaagatacacgcaacctgagtctatgctaccccaatggacccatcaactgaatgtcgtcggctgactattcgcgtctcgcagcagctagtgaaaactaggtaaaactattttcggagcttgacggagaaagatatgaatgctgtgcgcatttgcctggtatccacacgatctcccaaacttgccggggatcagttgtggtaggcagacaattgcctcgatcacagggcctggctttgtcggcacggaaagggcatccgcagccttggtagtacttgtcgtcccagttgcacatctattgaaaattttagagaggtggtctatcaactaggtacaatagcttggctttaccttcgatgcaacgtattgtctaacgcgcctttgaatgacgaaagtttggtgataagcaagctggaatcggcctgggcgaaggaatgatgtggaggataataggacgggagttggagaactgtgtatgagggttgttgcggaagcagtagggaaatgcgcggtgattgcgtttttatatgcagtttcatgaggttcgctccaagactacattttggaccaaagggttgtagagggacggccctcgcaaagatgccgtaacggaacgaagcatgcagatcggagatggatgccctcatcaccaatggcaaaatgccagcagcagggaccccgttagctcggagacaaaattcgcatcccggcgaaatgagagacgcagagacatccttacgatcggagatgacacaaggctggctcatagctcagcgtggggacaaatcatcccgcaattggtggccaacaaaggagatgcatcattatgcatactaggagcatctgtattatctagagactgcgtagattgggccaatgattcagcgcaggagcttcagccaccactccatcccccccccccgggcagaaggctggtttccattgtagccaataataacggaccgaaatgccaagcccaatcaaagatctgtgcccatcgtgtccattgtgtccaccgtgtccaccgcgtccatcgtgtccaccgtgtccatcgtgtccattgtgtccaccgtgtccatcgtgtccatcgtgtccattgtgtccatcgtgtccattgtgtccaccgtgtccatcgtgtccatcgtgtccattgtgtccatcgtgtccattgtgtccaccgtgtccatcgtgtccatcgtgtccattgtgtccatcgtgtccattgtgtccaccgtgtccatcgtgtccatcgtgtccattgtgtccatcgtgtccattgtgtccaccgtgtccatcgtgtccatcgtgtccattgtgtccatcgtgtccattgtgtccaccgtgtccatcgtgtccatcgtgtccattgtgtccatcgtgtccattgtgtccaccgtgtccatcgtgtccatcgtgtccattgtgtccatcgtgtccattgtgtccaccgtgtccatcgtgtccatcgtgtccattgtgtccatcgtgtccattgtgtccaccgtgtccatcgtgtccatcgtgtccattgtgtccatcgtgtccattgtgtccaccgtgtccatcgtgtccatcgtgtccattgtgtccatcgtgtccattgtgtccaccgtgtccatcgtgtccatcgtgtccattgtgtccatcgtgtccattgtgtccaccgtgtccatcgtgtccatcgtgtccattgtgtccatcgtgtccattgtgtccaccgtgtccatcgtgtccatccgaagatcgccatgatggagacttagtctctgaaatctggactcttgagtacgttgctaaagactgtatcaaatcccgcattgacctccgtcgaaaagtaaatccatctgatcgacctcacgcaggaaacaaccattcagtagcaagtctgaatccggagaaccatagccaacgatgacatccgcggtaccatacgagaatttgtacgtttcaggggtatatagtcttgtgtattgataacagcctcgataatgcggacaatccaccacgcttggtgtggagttggccttgaaattggatgggcataactaatggtgagaacaggggtagtaatgggacattggtacgattcaaacgatatataatcttgcatatctataagatctcggcatcgtaggtccttcaattgagtgctgtgctgttttcaaagtgtccctgcggagttcaatactttccctgtctctcaaaatcaaagtcttgtgcgaaatatgggtatatcaaataccctctggtctcgttttatcgaactctttggacgctgcagggcgaggaagcagtcacaggaaggccttcaaggtttggatgcgtttttgacaagttagactgcaacataataaccgttgatccagaagtggtgtatcagtgttcggcaccgcatcgtggaacttccgtcaaattgatctctgcagaagaactggacgagcttgcagtgagtgtcccggaactgttgcattcagtcatcttccaatccatggctctaacgtataataaatagaaacaaccatctagttcggacttcaatgtcggtaatctgcgcatacgcatacttggacaactggtagatagcagaagtaccaatgtttaccatatgcagcgcgaaatcaggaaaacggaggagatcccgggcacaaaggatcttatgcaggagttgtggtttgagcactactgggcctcgcagacagagctgattaaatcttcgattggacgtgatctcctgcaagacgaggcctccaaaggagttagcgagcccttgcctgaagatcacgctttcaattattcctcattcgcccagcttctccataccctagatagtgccatcatgcagttaatctgaattatatggccgatgaatcagagcggctgtaaactagaacctatgctggaaggataattaagccaaggccacagtcggtcgaggctgagggctttggtattataatcttgatcaaattctacttgcatccccaccgctagttctatccagcaattgcatctactagtcttttggatctgtggagatgcgttggcgagccagccctcacctataaagcctgagtcttcgtcgaactgacagccttctgtttcctgttctgaacaaactatttcatttattagcttctattcactttacttcaagatgtctgacatggaaggcggctcgcaatcttgatgcaagctctggtaaaaacgggattggactatatttgtccgggatgttttaagctcttttcagatccaaatgcttgctacagtcattgtcgaaaggaaggggatgaaggggatgatatccacaaaggtcttggtctgatcacgaagaaagattttccgaaattccttcgatgctaccgggttgctattggcttccagatagaagaaagagctcttcccttgggagagggcccaggacgccgctcataccacgaatgtttctctgttgagtttgtacttaacaattgtggtcagtcttttcacccaaacgcaagccctatgtgtcgaactgacgataaaacagtcgcaaaaagagaaataatcgacgcaatgcggttggccgtgattaagatctaaatcaacatcccattgggttagataaagtcatggtagtgcgttgcagaggaaactcgtcgaccgacggcaaactaacatcgcaatttagataccgacagaaagctttcaatttgaccccctcatccaacggcagtctttgacagctggggggcaggagaagagcaaaggaaacgggcttggcgaaaaaccagttggaggcgtggtataagattcagtgatttgaagttggattggacagttgtatatatacccgtctttattatttcccattgactagtatgatgcggataggccaagagatggtcaaaactaggtatacaagaccccgtcgcctatgatcacgtgtcgttctaatagccgtaatagtcccctcaatctttccttgaagtttgccaacgtgtccggttcacacattttcgtgtagctgaggtggatggatcggcacactgtgtcaaattgctcgtcaaagttggcgaagaattgaaggagcccctggggtagaggcaccattttcgagctaaaatgccaggcgagaagagaaagcatagccaaatcacaatcagcgagttcacctgccatacggtgggcatagttcctcagccgtctgttcttggccaaggctctgcgttttccccagggcaagtagcgatactttctgagtgcctggcaggaggatatcaagaatgtggtcctgtcattgagcttgtgctgtcgtttgattgcgcgcttgaggtatttcgagcccagaaaccacacttgttgaacaattaaagtcgtttcggcggctcggaaactggttcttgggaaaggaaacttcatagtttagcatatcactgtatataatccagtgattgtcttacatagaagtcttcaactagcgacatgatagcaggtgcttgggattctgttggaatactggagcatggttccggtgtaagatgggctggtccagtatttgtgttatgcccgagatgctcccgggtcccttgatccagattccggacgaataagaagaggttatttcctggatgcgacattggtcttctaatagtagtatcgccataccacagacgctaacaggaggctttcccggcctattaagagcaagtattttggcccactcccaaatacaaagcctttctaaaagttgaaatttccgttttactgaaaaataatgtaaacttagcgccattgggcagccggaatacttctagcccttcataccatgtgttatctgcgtccgcctggagcggatcgatgctagttcagggccactgtggagatcaattatatgcagctttcattggataactgactgagtgcccgagaactgcatgccgatctcggttatagggataattttctccattgcatttctttttgcgccatttcgaattaccaagaaatgacccttcttacttggtccctgcacatgggggttctcggagtgcccgagtgcattgcttagaaaggatgttttatttgtgccagggcgttccccaaactccagctcttcaactccctcgtacagtaccgtccattgcatacattgcatccctttcagtcacccgcaatggactttcgaccaatcttccaacatttttctcatagtgagtaaacttatcatcctgtcaacttcgatactgataggcctgaagccatagtcttgaatgacccaagagggtattctatgacaccttgcctcagtattctggcagcatgtagagagagatatggtcagcttgaaaccggcgcactctcacctgcctacatttacctggtcatgatcgaaaattcgacctactatacaatgaacggagaattgggtcagcttcttcggcgattattgtatgatcatcttcaagaagagtggctcaaagaaactgatatgggccgtttcattcatgttactctagcggtcaaaagagaagtgcttattcggtgtgatatattttatgacatgcgcggctatacctcagtagccgggaatgtggaggggactgtcctcgccgaaagagccattctggagacgtttcagcctatcttcgactctgatctggctatcggagcgtgggtgattgagttctctttttccgacttccggccgagggtctctcggataggttcacttgaggatttgtgttcgatatttcgccctgtatgttaaattttgtcctcgattgacaggacatttaagaattgatatacatggatttgagcgtgctcacagcatagatgcgagcttttgtatagaggcatgatctttttattagctgcatgcttgaagttctggagacagctaaaatagcacacctacactacccatgtgtacttgctttctccagttgttagtgtcagtatacgagttaactttctaatgtctttatgataagagttaggtatgaagcaagccttggttatgtattagcagtgatcctaatgcatgtgtttgttcggatcgggcaaggtcaagcaatggagaaggggaatggagaatgacattattgaggtaacagggtgagatttgctatggtggctaacgtagagcagcattaggtgtatatacatactggtaagaacgaaaagaaatactccattgagcagctattgacagattgctgcaacgatgataacataatccgacgatttaaatatacaagaccatttcccctcaaacacataatgttccacaagccctagtagcctgataaaccttctcttgaagctctttacagactccggttcggccattgtcgtgtatcggcgatgaatatcagtgcaaacatcttcgaagattttcgaaggctcgtcgaagaatagaagaagctgacggggaagaggcacactaaaatctgcgttgaaatgccaggtgagaagtgcgaatattttcagagagtcgtcggtgaggtcttccaccatggcttgcacaagccgattcaaaatgctgttctgggctaaacgtttccgtcccttcctgtatccattcttcctgagatgctggcaggctaccactagcgatgcaatctcaggatcgagatcgtgttgccatttaactgcatttgccaggtccggggtacccagcgaccagatttgcaacgcttttaatgatgtttgggctgatatcttgaggtcggcttcgaaatctgtataatcaatcttaataatcaatcttagtacgggaatagaacgaagccatttgcccttaccatagtttccgtgataaaggcagacggtggaggactgggcaggtgtgtgcacaatcgaagggacaaaccacttgcatggggatctcccatgtatattagggttttggagtgggtgtgatatacctcggcgcacggacgcgaatattacaatacctttcaattaaatggtaattttcattttttgactgcgcttgtaatgagacggacgtgccctacttagtattagtagttcatgaatgctccatacccgacgtagcgaagtgtcctagcagccaatcccacctattccttgtgtaaacatccttgtaataacgccccttgccttctttgcaaatttttaccagctactctcatgggatttacaaattaataagtgacccagaacgagctagccctcagtaggcaagcatcacaagtttccccgcccaacaccgcggagcatgaaaggctctcataagcaagggagcgggggttcccctttacatcgtatataacccccatcgccgcttgatcttcggccagataagaccgactctctttattcctagttgcccccgaatcatcccaacttcaattctttggaccatggcgattaacaatggccactggcttccctgcctggatccacaaccttccaactcccttgcccctggaccaagtcccccgtcatatccgcttagtaggagtatcattaaacatccattcgggacaggtatgtccagcactgtctgggtccaagttcctcaaacccaagttacagggatataaatgatgctaatttgcaataagaaaggggtatggctgatcaatcttatgttcaggccaactgctttgaaccacagccagcctcgccccaggcggaagcacatgtcggttttcattctcatggcaaagcaataatttcccaaaacatagacgaatacgccctcatcaaccataccattgggttccatggccaggaagcatttagcaatatgcagaagtcatacaagagggtggccatgccaagccaagctgtgcaccagagcttgaagtgaggaaatattattattttccgtgatgaatatttatgctgatatatgagtttgtgtaggacacaaaagcataatggtcccaatagttgtgtgccccttcaattcagcagcctccccgcgaacgacaatacggcgcgagggcttttatcaactaagagcccgctgccttctactcattgcaaaagaatcttccccgttgagtctgacttcttattgattgaccaatttgtggctagaaacaatccagccctggaaaacatactttcaaatctcaagcgttgcgatgcagctctcctggagagcttctatcgatctgccttcgaagggttggacccggacacatgtgaagctattttgcatctatggatgagagctttgagcccaaaggccttggttgggatccaaaacacatatttgagggaactgacgtatcctggtttgtgcttccaaaaacccattacccttacccggactgaccattgaagatacacgagaggttctctgtcatatattgcgcggatgccctggagaggaaatcccttttaaacggcttctggagacactacgcttggttagtatcgaaggcaagaaaagagtggaggttgaaacgcgtttactcctgcgtgagattgaagtttggagagagttataccagtaaccattttacggcgctcgcttgatagttacgttttactgagagatcctgtatatttgtatctcaccatgtatagctgaatgggtgctacctatcagtgacggttttgacaaaatgaatcgtggccgtatacattaagattatattcagaaatatgtagtttcaaatgttgacgaggatattggcgcaattccaccattctgttatatacctggggatcttataaagtagaccaaagcaagacaaaaacagctacgtgtatttttgttatccattaaccatactctctccttccacagaaatctcgcaagaacgtagcttcatccatatcaccattgatcaaaaatggtcgatggcttccgtaatcacggtagaccacggtttcgctcgtaggacctgcacttccgacgagaaacagtcacatgcttgtaccgccaaatgtgcagtttttgaaggtatacgtcgtctggggcttgcgatcgacagcctttctcttttcgcgacagccgatgatgtctggtgcaagtcaatatccaagccacatatatagaatgcgcgtcatgggtacctgggtgtctcaattcgtcggaaccggaaagcagatggggtttcgtgctgtgcgaggtgcaggtcacgcgtaatgaattagccacagattatttggagatggaagggctctcgctgggaccttatgtacctggctcgcaaaattcctcttgatgtcgaaattggcatagggttgacctggaatgggccttgtatattgattagcaaaaaagtgcaacaggagtctttaggaaacagttctaagcacgagggtatcataccgtagcaatcttctctggatgtgactggatacttcaccatcgaggcattgcctggattggggttgacttgtgattttgcattctgaggcccgccttatagccatttaatggtcatgctgaaagtaggtgagactgaatagagaaaagtcagaagtgcttaggaaacagggctcgttgaactgatcactaggcaaatgggatgatgaagagagaacagaatgtgatggggaatgtatcgactcacggccatgggtaaatttcccctggtaataatgcttaggtatggcttcgtaatttatatgcttaaaattcgataataacgctccgtgggtccctgtatgaaagtgtctaccattcacaaacgcaccatgcaactagatgcggaacgggctgtaaaattgctgcgtgggccctggtaatgaggttcaaccattgaaaaagacctgctcatgcaaccgacaactaggccaaggttcagcccaaggtgctgaggccagttgcggctacctcggaccacctctttcagacaagatcaaacttagtcctacgctacctccgaatagaaattctcgcataacgctagcccaccttcatatttttaatagcatgggtctatcctattttcctccccggcaatgccgaaccatcatctttgttcttacacgctatcaacaccatgcatggttgagaatcccttgaagcagaagcagctctttcactaatatacttgaagtgcgggcgtcccgttaaaggagcctccactccggatcaacatgagcactcgagatctgttctgttttgagcatatgagttacaccagctcgccgcaatatccttcggggtctcctgtgggaatggtcgacagatgttttgagactggatctgaaaacaacgtcgtcgacgaaggacctcctccagcaccacttgcgctctctacgtattccacacccccgcttcctcccaaataccgcacgatcaagcctcgattcagtgatggcggcttaatgcccaaaccccccgatgacacgttggaagttaagcctcggagacatcgaaggagtggaacgcgccggaatcgccaacggcagcaacaagagaaaattggagagcctaatccagtccaacccgaggcggaagccagcatggtctcttttactagacccaggagcgagaggtttgaactgccaaatcatctgaaactgccatagatcctaaggctaactcaacgactataaaatttcagttttgtacccgtcacccaatatacggattccgacctgttctcgaggagtcaaggaccttctctcgcaccttttttattctcacattagaacgatcttacaagcccggcggaaattcgatcgcctttattccctaatattgcttccgcagctcttgtcgtcgaccgtccagcctatcaccatgatgtgcccagctcccttgattcgtcggacattcaggtttcaaggccgaattccttctttgagctaagccaggatcgagattctatgagagcagcttctcttcaattctcggagcatcttgaaaagaccaaagttctgcaatcgttgagcattttacaggattatatggcgaagtatccttcggtctttgaaaaacaagcccctgagatggtccagaaatggatgttggacattgaaggcgttaaaccaccagggtctttgtccgaatgaacaaaaaagcggaaacattgatgttctcgtcctaggttgcatgaaagatatataatttaacaagttgctcttagaggccctaagatgccaccttcgtacgttcataagtgagacaataaaaaatttgctttgcctttgtaccaatcccagcaggataagttccctgcatgaatgcagattaccaaatattttgcccttttaggctgaatgaagatgactgtatatgaaacatgtcgatgagccttaggtggtcataattatctccatagccaaaaacaacggaataacgatagtgaatgaaaggagaaatgacatcctgcattaaaaacccgttcattttatatccggggggcatacgcaatattaaagaaactagtgaggcctggctgatgctactgcagcatcatcacagccaagctagcacttatcttttgtagcagtgttcagacctatccctgaagcaaagctgaaggctcgtggcccgacaatcagggtcagccgcatgacacgtctgaaattttcattctagcacactgcatggcaggggctatgttcccaggaatgaacatctagacccaaagccactgtaggctgccgtcatagaaagtctcaaccaataacttcgttgtgaccaatccagaatattacgtgtcccaagggggctagttcaacctgacctggtatcgatcatcacaataagacatccagggtggataggccttttctaatcaatagtggaagttttatataaaatccactctaatggttctaccacatcatgaattgcagttaaagacatttgttatcctagcctaatcattactttgaggcaatatcgaatctctggtatggcttcttgttttgctgaacaacaggattcgaagagtgcgagctaaatttcctcaggacggatattcacttcaaatccttcttcaaggacggctaaaacaagtttcattccaggcttggctcctgggaactatcgaaaacccaaccttggtaccaaatgggttcacgctcgctgtcttccgaatttcaaggtgagttgacgactaaggattttgaccaaattttcatacttatcatcgaagcacaatacgcaaggattgtagaatgtgagagaaagtgccagtggcttgagcaaagccgagccccatccacagtacacctgcctagtgaccgatggtggggccttatcaccctacacttgagtttgcttcacgagcatgaacaattcttcgtcatgtgccagcatccatccgtcagcctggatgtcaagaatgttcctaaaaaatatgagatgtctgatcgtatgtggcggtatgggatctattcgttgttgaatatcctacgacaaagcctcccagggtctttgaagtacatgctctgcttcatcgaaacggtctcttcgattctgaaacggttgattctgtcgaattcagagcttggggactcgttgttcgaacaactgggcgatgtggctcgatatggtatgtttgcggagaagttgaatagggaatattggaacgttatatcgcggtgttggtaccaaaaggctgcggaccgaaatcccgatagcggacgaatccaacatcatcttggggtcttgtcacaacctgatccgcttcagacactctttttccttaccaaagctctcatcagtgcgcagccatttccaggcagccgggtgaccgttggccgtttcttcaatgactggcccaatttggcacttcaagaaaattccatggccacctactttatcgccgcacattacgtgctacttcgtggcgactccactgggcggtttatgacttttataaatggattcttgtcgctcttaccatcgtacatggaacaccatggtcaccaaagacaacacacagtgtacgtcatgtcctgcaatttcgcctctgtattcggttaccacaatcctgcattcatggctgtgggatcttcccaaagccagagtggacatacttcccagacaaatgaatcgggtccagccaaccagaagcaagcatgtgtaagcaattgttcgatcaaccaacctgcatatccaactaaacaagccctacagggagtccatcttacttttcggacactctcggtccttcttcagtatagtaacggtcacaactcagtcccagcaatccatgtctctctagcctttctctggggcctcacctgtcatcaccctttcatggagagtttggaggcgagggttccttggagagcaatcactagattcctcaatagtctgatcacacccaacgatgattttccgaagatcgaagacgcgtcgttcccagctgcagacgatggagcagctctacagcttccagaagatttcttgatacggggccaaacttggagtcaattatattacccaaaggggtttttcaatggatcaggcgacagtatttcgattgaagtggacagtgaggtgaagataagaagatacaggtgcctctggctaggtgtgcaattagcaatggtaggttttcatgacttgaattgtatctacttcacggccacggacgaaatggtgctaatgaattatatagtccggtccttggatctcttacattcctacaaagggattcaattgcacttgctagtaaatatgttagcagacagtcatagctattacagagcaccctgaagctgagataaaggcaaactaattgggatgaccccacgttgcccttcattcccgccggaggacatttaggaaaccactataaatggcccattgttcgaagacaaattgagtttttatcgttctccccgttgtactatgatagatagtagattttagaggaagacagccttgcatatagcgtgtatatgagataacactcgccgagcatagataaaaatgtgatagagatagaaaactcgggaatttgtagcatcttagtcggcgggtttcttattatttacgcaagcataatacctgtctttccttgccaattacatactaaaggtatttcgtcggacaatattaactcaacgcagccgattgctacgcactgaagactggtcacggttagatcagaagggatccgggtccactggccttacactcctcatgtttcaacgtcaagatctgtctctcaattgtattgttaccaaacaggccttactgcaggtcctttagtatatcgaagaatggtgccagtagagctctgaatagatgtgtaccaagctattggtctatagtatgaaagaatcatgccgaacaatgacaaagtaacagcgcaatactccaacagataaccatacgaacagctgaatttctcatctcgtaacaggtgttggcacatggagcactggataagatcgcacggatacaagactaaagttcgggcgctttatatggaaggctcagaacagggacggttccatgcgtcaaagtaaataccagatatacaagaccgcatcgcctttgatcacgtgccattctggaaaccctaataatcggctcaaatttctttgaaagtccgccagcttgagtggtactatctaaagtcagccaaagttgagtatttcatgcgaaattatgtttccatgatatattccctgaaagcataaatgagcagcgcagttgtatctgacgctcaggggttattacttaaaagtagccctttcctgtgacattcctacatatccaaatgtcagacaaatagatcacacaggcgcgtaacttctttcaatcccctttcgcaggatcctcacaatcaccgagacttgctctacaataacccaaagcttggcgtgccatgaatttgtagcacgctcagtgactgagatttcaaatccgacatcatgcaaaccaggctatgtccaatttcattggggtcttgccaccaaattagaggatcctgggccattttggtaggcgagaaagtataaggtgcagacagcacatgcggctatttatgaagtggctcacccgtacgatggtaatacatttgctgcgccaaggatgggagcggagggccttggtaccgttcggcaccgcctccctgcaacatgtgaagcggatagtgaagaagacaggttgggctgctcaggaaggacgctgagactgatattggaacaattgcttcgggcctcatgtcaggatacgcgggaccactagtatggggtgtgaacaaaccgcctgtgtgagcgcttcctgacacaccgctagtttaagaagccccggattgggaattgggcctgcagaaatgggatggtctggtgtttgcaacttgggagttgggcgggcaatttgggtccgggttttgtatgtaagtgagctgggagttgtttttgggtgggatatcgacgtctcgcttttgagactgcgatgtgttctgcaaatctgtgcgcattcccagttgtgcaatgttggcatctgaaacatcaaattggcagtgaccgctggttctcagcttcttctgatgttccggctgaccgctttgagttatttgagaacctgccagttcgtgctcaggggtaagctgattggggtgcccttttcacctgcaagtgcaaatgaaagcagtcagcgtgggaagcaaagaaaaaaaaaagaaaaaaaaaagtggctgaaaaaggtcaggtaacacatagatctgattatcttgaaagaggctagtgactatggcggacactgcattagaggtgagcttactctggaacccttctttctgtgacacattttagccatctctcctctgcccgacacacttttcttttgatgctcgctggcctccttgcccattaggtagagcgtctcgctcattggtctccggctgagcagttgaatttggatcagcgggatgaacgttcccgccattgattgctgtgaacctggatgcaggttttggcgtgatttcaactcggtggcgccgatttcccaacgtgggggtatcttcggcgctgtcgggtgtccaacataccatctgtccggaagcggattcgggggcaacggcagccggtgaactttgatccactgtttcgtcgctctcatgtaacggtggagccatatcgcgagaaaatctgtctatgttgcctaggatctgtggctgagtaaggtgtcgcgatctagatcgctccagcggtggaggcttgagtgtagtattctcattgctcggtactgctgcagtatgcgatgaatgcaagctgggagtgtcggacccaatgatggcgttgggtggtcgtgataccggcatagtattgagaacgggagcaagcggagttagtcgacctggagtgggggctgaggttacatccttatggcgagaatctgcctttctctttctgcgacaagctgtaacgatagcagaagatgatcgatagtggccaaagtctctcagaaactcaacttcaagtctctcctttggtaggtttttccgtttcatgtgccaccctagtaaacggttcaggtccttatggttccaattgggatgagaacgcgccgcctgtgatttagacttctcatggagacatcttataatcaattcttcgtcaatgaaagcactttcagaggcatcaatggttggctcatccattccgcagttttgagggtgatgctcagtggagttaccagtggagcttggttcaggaacttggaagggcgttggtgacctgggcacactttctgtgtggctttcatcattgaaacccacattttctgaacctctagtcaatgaattttcgcgtgatgaagattgcggagaaagcgtctctaatgattggttgccatgtgccgtgtctgcctgctccatgtgcattgtactggtctcagcgcaacaggaaagcgtttggcctagccattcgagtgtgatatcgtcttcagggggatgccggattggagattggataggctctgatatccgagggggttctaagggagagcttcgtggcaagcaagcatcacccatctttgatattgcggcgaagacattggttggattaccattccttagctgactttcgcccaccaggtctgagaaacctggatgggctttaggcgattcttccgcctggcggcttcctcgaactggcgactcattttgacttgtacctgactgaggttcacgctcctgaggggcgcgctggcaacttaacatttgattcgcagtatcctgttcaggtactgcatgtagatcgctggtttctgtttcagggtcaaccggttgaacaccatgaaggccgtaagaatctccatcctcgcagtcttcagaattcagatatggaagcaggttcggggctaaacgcaaaatgtgaacctcgaagttcgacctcgagatcatttgttgggtggaatccactgatccagaggcttgaaccgctggtggggaggagcgtggtgtcgaagacacaggtcctttgcgcaaagtcttcttattgcgcttcctaaaaggacttttaccagttaggaaatacactcttgcctcaatagcatggaaagtccttttttgtttgaatgttccgtgaaagttgcgtgcaatctcttcatgcgactgattcttccgtacttggtcttcgaaccatagaggaagccgcttcaatacttctgcaggccaagccttgtttttgagaactagtacatccaaattattagtacatttcttcaacctcttcagtctcaatgccacgtttcttatgtgtattactcacagttccgggttccagcaccgcgttttgaagcactggcttgcgcgtctgtcctttgagtctcgatagccatcccctcgagcgaaccagtgtcaaactgcggtggcgtagttattgctggctcttcggctgatcccaggggaaagggcgagcccgccgatctttgaccttgctccggattgcggcgaagaaatcgatcccttcttagtatctcctcaagcacagtgttattggctttgatgactgcgaggtgacgtaagcgagtgaatagggtaaatataatgtttgagtgggcttaccgtccgatgcaagttggttcacccgtgatgccatttcggctgccagcgccaaggtatttagttctatttgtacgtccctttcgtaggaccatggttaaatcagctttcgaggtaaccctgaaaggatcatgttgtgttggaaagcagacaactggacaatcacgccccggtctcgcatatggaaatggtaaattccattccctttgtattcagcctcataatttctttccttgacaacatcaagccagttgatattggcactggcttcgtcgttgtggagctgaagtacacaagacttcggtgcttcaaacatcacttctattgtcttcactagggcgtcgcttatgaggggaacgttcaagaacccagcaaagctctctcgccccgctaggggccctgaaatgtgaccgagaatgctgaaggaccaaagacagcttatcttgaaaaggcttaaaatgctcagaatacacgcttttcatttctggcagacagttcagtatgcagtcatcttccctaatgttgcggccagagccttcaacagtgacagcgttggtaaccatctggaatgtgactcgatctgagtaaaatcagttggaaacctgtgggcacatagagtaagaacaaattgccgaagactgccgtgtaatcgaggacacacgtagcaatgtgacgacgtttcatgaaaaggagattgtgatgtccggatgctacgcagaggccccgacagcgctagttataaatccatttgttgacatcacgtgtgtggacacttagataatttatcatctgcccagtagagtatatattaccactatattaattggggggcggtttttttttattttttcttcccctccgctccgtggatcgtgttcaaacaacaataatgggtggtaggtcatattcctgcgtgtctaacatgatgccttggccggagtaaagtacacttttagtgggaagctcgaatcccgaatctgacccgtttgaagcgggatacactaatcgtacctgcgtccaaatggttatcaaagtagaattttagtgcgggtggttttcttgcattatctcgcatccaattcagagaaaggagatgggagttactgattgagcggggatccgagaataggtctccggccccacctcccgttttgctttctgttcagactagaacggaataaaatacagagtctagccaatgagactaccgccgccaagtgcggttgggaaatctgggtttttacacggatgcggctagtgatgggcgcgttaggtacagacgtcgtagatcaaaacacgtcattactcccaccgttcatgctcgtgagacttaaaaggccgtgcattgatcaccagagccggataatcccgcaatcctctcagtgttgactccgctttgaaatcgtaaatcaagcccgcctgagacagaaggtcaataataacccgaatatacccatgatataacagccatattgtgtggaacctcattgtttgtactcacatgagcgtctggataatttttggttgtgttcaacacgagaggatcattattctgctaatagccatatttgagatttggttgactaaaaatgatagcaaatgttgccgtttgatcaccccgtatatttttgttacgaattttgaagaatagttgcgtaccgcagatttcaagggttaatgaaagctgttcacagtaatcctacacgtaccaggcaaaggcccgtctttttctttgctggcagctggttcgtctaatgcgcagaatgttcctgatttggggtttgtctgtgattagggaaagagtgcttgcgttgaacaaatggtggaatcaccaagcctgatgaccagcataatccgattaatcatcgataactagttcagattttggccgctcttcttgaccactcctcttaaccactcctcttgaccactcttcttaaccactcctcttgaccactcttcttaaccactcttcctaaccactcttcttaaccactcttcttaaccactcttcttaaccactcttcttaaccacccttttcttaaccacccttttcttaaccactttttggtagaatcaagatcgcactctgtctaccaaatgtaattactgctttgaggtgactcagcatgcaccacaccacacctcatggggacatatcctacttcagagttcttttctgtacaagtacagtggaagaatttttaactcttccgatgcattgaaataaaactaaaccaaagcgcgtattggtggacagggttggctacgtcaatattgagtgataaacaattatctaggaacattgattcggttgaaatcacactttttacgtctaaaatgtcaaaaactcgtcttgtgggtgcatagagtaaagctcaagatgagattctatgcgcaaaccaagaaaataagatagtaaataagttctgtgcatgtcttagcttcctcgatatcgacgtatgatgatcgagtattggtccctggcaccacggagaggtgctgcacgccgccagagggagcacaaactttacctcacggggctcagggcaatgagggagcacaaaatttacctcacggggctcatggcagtgagggagggcaggaagcctgctcctactctccaaagtgggcgcgtagggcttttttatccgttcccactacgagactcgataagtaccattaacgcaaccccagcctcgtgggaatgctatagtatggacgcgcagtgaagatgatgatgtactcaaagttatgaggtaaatgatttcacagtggtcagccaagttcgtgatgggtggatcccagaccgataggtatccactgactaaaagtcgggcatgtgaatcaaacgttagactgccctcataaacatcttcgatggcctaagatgacctgttcaaatggttatctcgaagtcaacttgctacaacaattgcgtgttttgttgaattacctagtatattaatggcgtattgccccgattccccgatgcaacgatttctgggcgtgtgttgattcttcctttacctaagctggctaatgcaaacaaaataaggaacggcccatgaggatttatcctgtactgccctttacgtttccaattttcattgttatctgtttttgattttttttttttttttttttttttttttttttctttttttcttttttgccgcgccggggcccctttagtgcctgcagtagtgcgaatccaccacgcgcacgaaatggcgcattcttccacccacgttcctctctttccccgacctcctcctcgttctccctattctgaagtttcctggattttgtcacgttttttcaatgtcgtacgcccaaattctacgatccagtcgtcaaccaggtggttacgaagcacaaatcgcaagcttgatgcctccagaggaagagcaacaacaaacaagaataacaccgtttcacctcaaaggaaatcctgatctaggatcccgtgccaagtatgagaaaggtaccatcatttgtggtcaaggcccacgcacaggatgaatggtggctgaattgaagttcacagcagcacagcaatcttcgcggtcaacccagcaaaaccaagagtgagctcctaccgtacattacagtggctggccttttgtgctgactttgagattgacagccttcataagcgagtcaagtgagttccacagccttcttagtagtttggcagatccctactgcggtaccttgctggagtcggagcctgctttccaagtgagcaaatcaacatgctaaccagacttataggaaaatcgaacactttatcaatggcattactcagaatggctttgccgacgtattgaccgaaaacgcgacattactgagcgaaaccacagctctcaaagacaagatccaagaattagaggaaacactggagaacatgcaagctcgtgtagatgaattgtgcaaggaaaggcaggtttctaccgtccagaacaacccagcacgcaagaaacgggcaatgccacaatgaccttgctcattggctctctattagaaaggcgctgctctcacctccacttatgatttatattcaagatagctctttgaatatattgttctgtgaaatttccgggacagttggcaacactgtcgccagccaagacgaaaatgctgccaccactggtgaaatgtaaagaattatttttttaaagtacttttctaaagtaggcattgattattaccagttcatgtctgatcttcagtcattttattcggcgaggaggcacacggacagtggggctctgccaatgtgaaccatggagctgcttgtgccctgtgcgcggcggttgctgatacttgagttaacatcattatcgtcgtaacacaatgccgtgactagcaaatatgtctaggttcaggtatttgggacaacatgggaatcacgctacgttttcttcggcggccaatatagatcgatctcaaacaggacgaccgatgaaaagccagatacccagtgtcaatattagttatatatacagagataccttggaacatgcaaggtggatgatagagccatctccattgagttgtacatagaagtggtaaacattgagaatcataagatctcagcattccgtgacgctctcatagcagctgccatacggtgtacaaacttccagtggtacgaaatatgtcgcgagggtgcggacctcagagtgtgtggcggtcggatcgtataacctatcgaatcattagccgtcctgacccatcgccaaggctgccgctatatcttacctggtagtctctcgtttgcgttatccgagtcattcgtcaggtggcggcgttctgaaacagccagctgctctaacgcatggatcaaaaggcgagtttttgtgcgggagcctctaggtgcgtagattggaagcgacggcaagcaggacatccgagcttcttcgcgttggactcgtaacgaaactgcccccgagctggtggtctcagacagacttttctggatggagcgatattcccgtaacaggtagttttgtttgcaccttaatacctcgcccgttcgtttcacgccgaactgcctgaggtatgccctggacctttccttccaagacatccttcggtgccgatgcaaccaggaaaggaggttccttttctcccatgaagtccaggcgaccttgtttgttttagacatcctggttctaggcatttttatgacaggtaagccacagaattaggatggtagtgaaaggcgagatggtgcaaagatcggatgcagtaaaaattgtgaaggaagtcggttgaacttgggggtgtcacacgtttatctaggacgggaaagttctaaagcggtcttgattaattgcggtcttctgttacagctatgagtgcgggcttgctcgacaagaccctagtcgaatagttctccaccagatgcatcctgaccctggtcgatctttggcctctgtgtagattccgagggagaatagtgactgcgaatgaggaaagtgttgtatgatgctgttaccaggttgttcataggctgttctatttggcggaagaggcctgcagttttgtgaggtcaaagtggtcgtttgtcagtacactacaccggttgagaaacggtcgatatccgaggttatctgccgccttcgggataattattacgcccagtcatactacggttaatggtaaaatataaataaacgtaataaacggtggtatatagttaaacagacgcaaaacaaaaatggatatgaatataataataaaataaaacgataaaatttaaatccggtggggcgtggcacttggggaaaggatagccatattcaacggccatgtcacctgctaaacttaccgtttctcttttcttttttttttttttttttccctagaggtacattcggagcttgacatttgtgagtggaaatggatgaaattactcaaaccttattaatttgtaatatagggagatactgagttcaggtcctcattgctaggcttgtttgggtacggtcacttttcacttcgaatctttaagggatcaaattctcccttttcctaccaccctccattctttatttcacagtttctccccgaaccccctgcttgactccaagacagttgcaatgggtgaccggagaaattcgcagcggtatgtagaccgaatgtctcaattgctttcatcgggctcaccggagccaaacaatatttggagcccccccacgtcaatcgccggctctgtagacgatgattgccattcccaacagactgatgaatccgacgacgatagcaaggctgccttcatggatagatgcagtgatgaggagggaactcagggacatcaggccaaggaacagacaaaggaacgggtcttgggtggagccagatccgtaaagtttttgaatcctgagtattccgcagagtcaattgtgaaaatgatcgaatgtgtggcagagtgagtctgaatctgttgtcttatgagatatcgcatactaacggcttgattatagattagatgggcgggtgcagtaggtttcccttggagacaggaccagaatcccaacactgacacacttcagatctgatgcgaagtcgctcaagggccaggaccggtggaaccagggaatgcagcgaaagtatatagatatgattggttctataaacacgttgactaaagaagtggctacattgaggaaacaagtggacgttttgtcgagcagagatgcagtcaaaactcgagaggccgtgggctcgaagcgtcaaaagcagtgagacaataccactatattccatagagacctaaaacgaattatcaagaactttgttttcacgtgaaataatcctttggccttctcctagcggttacagaggtcacatgtcgccttcgatcaagttccgcgccagaaccgcaatttgtgacgtaccatgataacgatttatcaccgtgggtggggttcagtactgtagttgatcgctaataatcgcagacagataattatgaccgcgatgctcatttagacattgatggcgtggtctgtaggaaaggtctacgatttgttcggggaaagctcagtcgtacccggatcgaatcaacctgactcggttttcttggcgtatccaccgttccctgcagatccacgcacgaagggtaattttatcattttcatcaatcaagccaatcatgtcccggagccacaatgtcgcggggttctacggcaaatcagagcgcgtctgtcattaaattttttttaccccaaaactattaccacttactcccaatgctccgccaaatttcgtcgcttgttttcataggattgatccgcgcttccgtcaactccatttcgcttgcgctgcgatgagcatttggccgttgtggggtcttttgattaaatcaactcgaaggcggaccgcaggtcaatatgtaagtccaaaagggcctagctcttctcatgagaaaagcatacgattacaaaatagtctcggccattgattcgtcccaaccgtttattattacccgatcagcgttagccagaggatccgagctagcatcaaaattagccatagccatgcgtgccgaggtttccgcgctaggcaggggttgaattccaaatccattagcgcaatcaatagtataacccccgtatctcttgttcacagcccttaagactggaaggcgtgatggatgaagtcagtatatcagtggtagatccagaagatcatgtcacatggactgtgcgctatgcatgccatgggacgtaagaagctcacgtcccgtcccgacaagggccgggctgcggcccggtttcgatcgctttgttttttggcgcagtgaggaactagtccaaatgtggttagaaacaagtggttgaaaaaaaaataataaatagaataatacctaacccaggaagtattgacggagacatgcacgacgtaccaatatgcgtcaacccaatctttcaagtgtccttaattccccagtgccattctaatgtcacctcttatgtggaggataatccacgaacagcacccagggaactgaaggctacctggcctgatgaaatcagcggtgttcaatccagtctgaaccacggtcgcatgcagatcacccggcttatacgcaattggaaaagatacgtttagagtgcaaaaagcgttgcgatttgcccggggaaagctcaatgtgctccaccatactgcggatcgggccctggtttggtttccggagggttcccctgaatccgatggccaaaattgcgtcaattgttctatatcgggcagggacatactgagacggagtacattctgaaaatcctatttccttcaatcaactgagcaatttcaaattaccatattcatattattatcgcataacaggcggctatagtctcacctagtagcatccctcaatcgagataacctccacacaagctctccaacgtcccgccattggcttcaaaaggacgatttgcggatcttccaggtcggcgcaaagtgctgatcaatgaccggctctgatcggctcataaatctgcccaagcacaatggcagtagttcagcgagatcgtgacacttggactacgcgatgcctaatgccccgtgagccagacactagactcaacctagcttaagtcgaaaagcctaggccatcgggattacgtatgcacaatctgataaagtgtcagaataatcgcatagtcgccgttttacgaacttgtcgatacttcaaacgaagcactagtcaaaaataagtactatagacgagtgtattacggatgagggggaatttgattttcagcctaccgtcggactaacgtccaacaatgtcggctaatggcaggcatctctacggctttaaccacaagacatgaaaccgatcttccgcgctaatacatcctaattcggagggccaccataatctccgccgaagggccgttggccggatgagattaaatggagaattgtacaagcttgatctgcgcgacctaagggaagagagtgtgaccgtgcaatctccggtctggtgtattgaatactggactatacctgtctaggtggggtaatatatactacataggtcacggactacgtagatgataatatttgctgattcatgtcctctggctagatgaacaaccccgtaatgcctccatgatagtacacttcctctgcaaaccaactcaacttctagtatcttcaaaactgcggtatatattggctagctgtcgggagcggttggtggttggcttgtgttggcgcttgttgattggtcaacggaagtgaatagctttgaagcgagttggtaccaagcgaacccatctggccgttatacaccggccaggaaggttgtagcacatcagaagcagggaagccagcaaatgtaagcttgtttttctctgcggttttctctgcctctatcttcttctcgagctggctctgcgcatattgaaaattgccgctgacctccagtagtataggcagcagattatcaccggctgtgctaccaacctgtgcaacctcgagttgttgtttcagactggatatttggaactcaagtttatgaatcttggccagattctggtcattggtgtcactcagctggcgaatctttgccgtggcttgggttttgtccgcctctagtcgctgtattgattgtaagagctcatcccgctctctatcagcgtccttgaaaccctgcaagcatcgccgatgaatgacactccagtgcttttgtttagaggccttcgctattggcgaggggctctagcttccacattcgggtgagtacttgctttcacgagatcagtaattaccggacgtaccaagggtgtatggagggatgcaccttgggtgtctgacggagggccaccatgaccggtggtaggacggcgtcgagtccgtttaggagcagtatctgactcggaactgccatgaccagcatcagctggggcttcggatgtcgtcctacgggaaggcatatcgagcgtcagcacgccgaaaggggtgtctttgcaagatggagtgagttcagcattgaccgttcgggtggacaacgttggctcttataggtctccggcgtacgcgccagtagccagaacattttggggttagtcccctgccgcttaatctgcgccgcaggattgcgaggttggcggatcggatgcccagtcattggtccatgacatgacaaccggcccgcaataatggttatcctgtaatttccacactatggttacattgagggtcggtggtcagccgttaaccatcacttaaccggtaggtttctcaacgatgaacttgcttcgtcgtctataattccgcagttaggttttgaacattgtcgggacggtgtactctttctatcagtaggtagcgctcattcacatccccaataaacattatcattgaaatcagatcccggtctcattcaaactgcccaagctttgccagaccatgcaatttcgccaagcacccgaccgccgctatccgtgtatgttagtgatctacctggtcttttcggttactctggacggtatactttggcccggagttcccgccgctaagtactcgaaaagctctatcagacagcgcgtatcgcgctgagcaggaactgataggtaagccaaatgttggttaatttccggtttactcactcctcccgatacatcaagcagtccatcaatgatcgccaatctacagtatggtacacgccgtaagatatttgcggcaacagtagtggatcatatgccgatctacgttcgtaaaaggtaggttttgggcgatctgtgaatataagagtctgattcgttggacctcgtaagctactccacattcgaatcagtcgcgactcaatagtgccgccactcaaccagatatcgagaatgtattgtgggttaacatagattcatccctgtcgcataatttccgttttcccgtgattagaaatcatataccggggtacgcgatttggctcagtctcgactgtgtggcacgcgttaagtctgtcacatgcggcactcgttctttctgttgtcgcaaaggccaaggttcccttgatctctaagctggctgtgtttactcgccgtcagccgagggtatgctatcagtttggcttgcatagcggtttctctgtgaaaatgtgaaaacgtgctacgagtcttgggttgacagtgtatactactccaatcttctttgccatttccgtcctagccggtacataggcatatcagggttggagagcacgaaaagtcttgctacggtcacaggcgggaggtatataaggcactgggtgatttcatcgttgcattgcacaatgtagacctcgggttctccccgccgtttcaaacttgggccggttaaccgtatatggtccaaaagagttcaaacggaccgttcaagatccgtaagatgtgagcccattgaaagtccaaggaaactctagttggggactgaatattgatatagagctatatatacaagcccaacctccgttgctcgagtaagcttcctagtgcttccgtcagacccgtctcctcgtgactccgatcaagacacaacttagtgcctgtctttattctgatagaatggattcctcggtaggcttactagacccctttcaagctccatctaactccataataggaatatcttcgactcctcgcgaggctcgacagtcgggcagtccgggcagaacgagcccagtccaaacttgaacaagaattgagcgcctccagggctgccgagaagcaagcgacagaggagctgggccatgtgtccagattagcggatattttctttgaactcagtcaaattctgggcggcgtggtagatcattggctgaaggagcgcggaaccaaagaacccggccaagagccggagtcaacaaagataatgcttgatgtgttgttgaaacagttggaagcacaggagttggccaatagcggtggaaattccgatgatgcctcggaaagcggtgacacaaaggcagcggcatagtgcagctaagtcatggctaaacgagagcttaccgtgcatcgttccttgttcgtgtacattggttattgcttgtgaaatgactgggtttgtttacggcttggtcgcgtgcagaaccgtcgtaagattcttttatctactttgctatggccgttcaaacggattcgtttctacatctgcccatatatgtgccgtcgtattcttagttcagattacaacacctctttccttgaagccgccagggttacatttcagtttgtactaattatggaaaccaacagattttctgtcgtgctcagaagctgacgcgagggcttcaacatgttctggaagacgacccttccaagtataccatcaccgaatcgctaccccggactcaatctgccgccagactgggaaatgcattcgaatgggaccgcattcgacgatcggcagctccatcgccagaattaatttctaagaaattccagaagtagaagatgcaaccagacagctctgagctcgatatgcaagtccaatatggatatctctctcacatcaatgctgaatcatatagcagagggctattgttgagatggtgaaggggctgctcctcaataagccagaatacatgctcgtcgttggtgggaggctgggacccgggacaaaaaggcaagataggggcagcagagtggggcgtgtcatggtttgttttcgttcgtagttggcggccctgctggaaaatagtaaggcattgtcagaccaaatggttataataaaaagttctgttgacgtaccggccgctaccattcatactgcgtggggagtgtgtttatcgaggattgttgtcgatttcttgtagcgtgtgaaagccggtgaccaaaaggtatacgctgactgtttgtgcctattatgtaggacatgctagtcggccagccgtgtgccggtaaaacagactgatggtacccatcttgctgagtttgagtagcttcctctgtttgactggcctgggcgtgtaaccggtccatccatctttgggcgcactttttaggtcgggaggtataacgcctgcattctgcgcatagcaaataccttgcggcctttgagagtcccattgcaggtgaatgaccggtaggaagatcttggaacatcttgaggcatatcgctccatctatccgtgaatccttggacacaagattttgacaagggactccattgtcttcagcccatcggcactttagatgatgagtgggatcgccaataatttggccgaggagtgattgaagattgccagagctccagtgcatattagtggagagtacagaaggatgacaccaaaggaaaggagatatctggtcagagaaaatgaggaatcttggtaaattttaagggatacattcttcatattaataaggtgctccagatggacagtgaaatctctcgtgaaccggacggtcaaagcgtctagatgaaggagaagagtcctaatgacctttggtttatcaccctacaatcgaagcttctatgttgcacatgacgaacgcttttcccttctcctaggaaagcaatacaggttcctaggaacacgagggtccctcaggacattccacggacttgtatgatagagatcaatgttacttaagcgcttttatagccaataggtgtcgcctttatcaacggctgaaggctgctaggttcctgggagcggaagtctggttcctggggtgcaagtatgggcttctaggactgcatgggctcccaggaatacccgtgtcgttccctgggagcacgcgtccggtttccaggaacacatattcaggctctaggagaccgagtgcttctgggagctcaaccgtctgccctgcaaagcaaagggcttctagattatcgccacccatatcactacacaacctcatgtataacagaggggtttactataaagactcaataaattcgtcgtggttcggtttcgaatcgccatcaccaccttgatacagattttaccccacatccacgtgccacactcaagatgtcagacccccaatggctttgggatcccttgagtatctgtgaaacggggcccattagggaaactaagacctgttgtggcattaccaagaaaggagatgcttgcaagctgatagtgaagaaagacaccctcaaggaaggtcgtcacaagttgaacaacctagcacgaggcccattcaatctttctactcttgactcccagctcagcgaccttgtatcattctttctctgcaaacagtggcatcgagagcgtcagcacaatgatgttaagcagcggtggttcgatgcagccgtgcgtaatcaggccgatgtacaagaatctccacgccagcgttttccacatattatcgcggaagaaatcgacggaccgcaacaggaaccagccagcactgccttggagacagatgggtttgctcccacatggggtgttgacgcggctttcccaaggcttccttccccgacatggctagaggtgactcggcctcctggtcgggatgttacaccgggcatgctcacaatgaatcgcgtgccctggaatgtttcacgggataacccagccattctgtccatccacaatgaatacggtggactgcactccctccagattcacaccgttcgccaagagtcctgtccagatggtgagaggtgcccaatttgcttcgagggagatagcgacgatctggtcatgttgcaatgcggtatatgtaagggggtggttcatttggggtgcatggagggctggctcgcccatcgtttaccgggaaacaacacctcttgcccaatacagtacgtaactcatcaccttctaatccccagggctgtttactaatacggacacagtcgatgtaatggatcgttccgcgctctcttacgctcgtcggctgttggaaatgctaccggcaactcgacagcagaaacacctctcgaagacacatacacaccagtagaagagacaagtgtgccaacagcacctccgcagcgtcggtcaacccagactacccggcgttcagaccgtcctcgagtcttctcaagctcatcccttatccgtcgatcacctcggtcgaggcgggttcccgaccgcttcctaccctaggtttatgttccgtatagacgaaagctagtttacgaatgcacgagatcaatgagtttcacaggatcagatttgtcgtagggctatgcgcaacgtgtttagcaccaatcctgagtaaagacaaacagttcatgtttagaaaggttttaggatgcattggaccccttagattttgcggggtagtctatgaacagacatggttggttccagggccggtttcaccgcggtgatcgtttttctgacgcagctttgaacgcttgacctaacaaagctggacagccataaacacaacagccacgctcggctcgataggtcagtgtcaagctagcactgcagcggggcaaacatgaacttacatcatggcctcattatattaatagtgattgtcgcaacgtctctgggtacaaattttcccactactcaatgttgacgccttgagccatactatcatattccttgcatactatcatattacttgcagaatgaatcccataaagcgccagccctctggacctgagcctgtgtggcgtgacggaacgcccgattgggccgctttggaaagaacatctcgtccttctgcgccgtcttccaggccccagcccggtccagtgataattccctctactctgcctcttcctcatcctgcgcagcagaaaagccaaattgaagttgaggctattcagccggtcttcgaaaatccgtggttgacttacgaggcgatcgtggtgatctctcaaggacagtcagtctttctggcccgacacagaaaagacaaagcaacactcgtcgatatccaccttttgaagcagcaattctcatccatcaagccattgctggaaacaatcaaccaaacgtcacaccccagctttctaggtctggtggggtgctattgttgggaggagcaggtatttctggtccgggagccagtagagctctcggtaagtcacatcctcgcatcaagatgcactatcactgaggatgaaattgctgcaattgttcggccggtatgtactactctcaatggttgacgcgggaaagcaaacggtgctcatgcccgataggttctcggaggaattcaatatctgcgcggtcacgggagagcactcgctgccttgagtgccgatactattctactcacggaacttggtggggtcaggatcggtgagtaaatatttgggcataactggcgggccacatgagcatgagattctgatagttgaccatgtcgcagcgggagtggagcatagttgccaaatcaatgcagccgagatggacgctgccactatgaagctgtttgccttagctgaggtggtggagaggctgatcatgaagaatccttcacaatatccatggagagccgagataaaaaatctgcctggagagctgaaaagatgcgattcaccggaaaagctgctacgcgtaagccttgacctcccagccctccgcgtcatgtactgaccaaacagagcaaattgttccagcaattgggggatgagggcgaactgaagatgctggtgaatgcggcaaacaagactgcttaccacaatctagagtcatacaagcgcatatgaacgtggtgacgcgaaaatgcggcgggaatccgtcctcttgccgtttggcaggtgagaagatataattgatggctttgtactgcagatggtacagaatttggaggcaatctgcagccccatttgaggagatagcttgcgggggcttttttgaaatacagctatatattatccatattacacacacacacacaattcattaacgcccggcggctgagccgaaagggcaactatcgctaaactactatacatgtcatagtatatacaattctgtgactcattggagcccatacacaagaccttggcgtatttgtcattctcagcatgcagtgtcgcagcggatgctcgtgggttagtaagttggttagtagactggcttgaaggcgcttctccaagtgttcaacatcctatcttcggcagttgaagcgcgtccaccgtgaatagcacgaggtggttggtgggttagattagaatgaaagaggggtgatttatgttcgtcggcggggttaagtggcctcgaggcggcctgtggctatggcgaatcgtattgaggcccgtactgcctctaagtttggcgtccacttttgatcgtcggaaggcgacttccctcccaggtaaaagggcagatttcctcggtgagtgtcggtacattgtagcatatccgtccggtgtgtggtccacttccgacatcgaaagaggaagtgctccacagtttccttagcttgtccgcacgcacactgatccgtgtcggccgcgttgattcgatagaggtatccattcagtctcgccatgcccgtccggagttgggctagcacggtcgcttccttccatgacaagggatcatacagctgtcgcgtgtgttttcctgggagtgctgcatctactcgtttggcgtgctttccgacgtccgctggcagggtatttctggggactgcttgagaccgtgcgagattcagcgtggttgattttatcctcggggcgcgttcttgcaagagggcatcttcttgtgtcgcggctctagcctgttctttagccagacctagcagcttgttgtcttcactggcagaaacccagcggacttgaacatggtttccgtttctctgcaaccttttaatcaacttgtatatccgacacacgaactcctggccagattgttgtcgagggttcctgagtgtgagaaccgccgctttgttgcttgtgagcagtgcgatcgtgtagtctttcagtcccgtcgccgtgctcaatacatgtgccatggctgccagttccgcagagaatggattctgctctgcccttacagccaaggtgatggatagcgctttgtgtttaagcttccgattccgaggtggtcgcttctcgatggccactccaaaacccaccagctcgtttcgtgcagagctgctaaccgcgacctgcatgcacccgcccgcttcggccagggactcatgctgctcatcaatgtcggtttgtacgcgttccgcccacggggatagcgtgaaggggttgatcgtttctaatgtctccatgtcgatgtgcttgagcgtatcggctacgtgatacagtggtgagcggtggtatcttctgaactttctgatctgatctgtacaccggcgaagaggattggtttccggcaaggtgtggatgtctgtccacattttcacggctcgtttccaaaatcgacgttgtgcagtagccatgtgagcctccgcctctgcgacactagtcgcgactgtgagaaatgtccccacaatggcttgcgcgcctactctttggactcggttgatcggccccatggctttatccttgcacgcgtgcatccagacattggaggcgtagtccactactggtgctactgtcgatgcgaatagctgtcgcgcggttgctggggagaggcctcggagtcgccgaagctccatcgctgcttcgagacccttggacgctgctctcgcgatatgctccttgtacttaagtctcgtgtccatcaagacacccaggatcttaacgtggtctttgggtaccaccgtctgccccttgatggtgaatggctcatggtccaatttacgcatcttgggagcaaagtgtatgatagccgtcttgtcagcctcaaatgtcgctccgcttctcttttcccagttgagtgcctcgttgatgatggcttcaattccttcccggttactctgcgcagtcggaccggtcacccacgcggtaaaatcatccacgaaagcgactgctcctccctggctgtcgatctgtctttgcacgaggtctgcattgaaaaacagaaatagaatcggagacaggggcgagccctgcggcagcccagcttgtggcaagctttgagtctcagataactgcccgttgatcaggatatttgccgttcgttccgagcagaaggccccaacccaacgaagcaagacctccggtatgcctcgggctttcatcctctggatcagtcgttctttgcatactccgttgtaggctcccttgacatcgaagctaatcaagctcagcactcgtcggccgcgccacgccgcatagatctgctcctgcaggaacaccagtgcttgctctgcggaccgctgctttcgagccccaaagtggctcccccggcggnnnnnnnnnnnnnnnnnnnnnnnnnnncgcgcccaaagggggctcgtcgggagcagtccatgcgtctccaccgcgtgcgagatcctctctgcgatcaccgattcgagtatctttccgagtgtcgcaaggagtgagataggtctccatgcctttgcaatggtgtagtcatctttattcggcttcttgagcggtatgatcttggcctgtctccactgtcttggcagtgtgccctcttgcagcgaggcttgaaagaggtcgaggaccctgtgcttgactgagggccacgtcatcttccaaacgatcgccggtaggccgtcttcaccaggtgccttccacgacttggccgctgacagttgccgctctatctcctccatagtgacggctggcatgtccacaggcgctctttgtggtctcactccttcctcgtcgatgttctctggcaaaggcgggaaaaacttggatatcaattcctccgcttgctccttgtgatcgttcgtagtggttccatcggctctgaggagctgcggaatcttcccgaacgcggcattgtctcccgacttgaggtacttggcggctttccagatgttgtcgttgtctgcgagaaactcgttccagtgcttcttcttttgtttgcgaatggcatcgtggtattgtttggccgcatcctgggccatcgtttcgagccgggggacttttcgccccgcccgtcgctcggagcgagcacggtttctccagtgcgtatatatatgacggagttgagtgaggtcagctgtccaccatcgcttcgcatgtggtgatggtttcgccctcggggttaaagcgtgtaccgcttcggacactgccaacatgagtcgatccgttttctgctgtaccgtgccctccgacggaaggatggctagagcgttctgaatcctggcgttaatctccttccatggtgcattcttcagtaaaagtcgctcttggtgctttgggcccgaccactgggcgtcgaacacggactcaatggcgcagtgatcagagccgtggtctgtctcgagtaaagcacattttgtcatggagtccgtcagattttctgaagctaggacgagatcgatggtagactcgcagtctccactttgtccgccgccgtgccatgtcttggtgccgcgtttaagcaagctactgagcgcaaactcattcataaggtcaatgatcggatccgcttccccttgtcttcccagcgacacctcgtctccaccccagagttgatcgtgtcggttgaagtcccctaccatcagaatctccaccacggcgcctgtctctcgtcgtacttttgtgatcgcatcgtgtaaatgattgcacgcatcgtccaaggctgagatattgcctccttcaacgtaaaccgatgccataaagatcagtcgctcggggagcctgaccatcgctgctgtgatgtctggagactccacagggacttgctccgcttcgacttctttgttgacccagagcatgctccgaatcgcccatctcccctccctccaggtagagggcaccatctttgtccacttgtgatgccccattggagtggtcaagagccggccttgaatcctcctcgcttggggttcctggatcgctagcgccaccgcgttttgagtgtcttcgtcattcattaaactctcgtgcactgcaccctgcttcctcacgttcagctgaattattcgaagagaattattcatgacgtgatggatagagcttccggcagttcttgctgtacgattcgtgaggccctccgcacggtacacactttggaaccggttggatacagtcgctgtggcgatggccctctgtagcgcatttcgcgcatttctgggcgttcttgcactggaatgccttatggcctatctcttggcagttgtaacattgtgtcggtcgcggtcggtgttcgaagacactagtcacaccagattctccccccgcgtggaaaaatccgtcggccaagagccttcgcgcgtcgatgcgtttggtcaggtaaaccaccattgaaccgtaggccttctcgctctcttttctgctcagccatgaaatcttggctacgttggtctcattctcctcactaaacgctgctgcagcctcggttcggacctcaccgctctcgtctagcacggaggtcttgttgacgctatcgactttgatcgggtagagctcgtcacggaggacccgagctcccgccccgattttctgttctgcaacctttttgaccagctgctgttcatcctcatcccggcaggcgatcctgatccggttggcgtttttcgggtcaacggtaacagcgcgacagcgccagtgcgcgtggccctctgttaactgtatctctgcctcaaccgctgctctgaccgagcctgcggaggtcgattttgtccctttttctgccatcttcgaggtatctatcgtgcaaaatagcgtgtccgtaaaggtggtgggtgtcgtgttcagcgttaaaagggaccgtatgttgcttgggtaactggacggcggagtgcgcgcgacatctgcgtaggaaggagagcctgcaacagcgggaacactgatttcctcgcgtaaggactggatttcgcgcaggatcgcatcgtggttgttctgagagcacgtctcagagtggcattgcggtgtcgtgtttctattcgtcagggactgtagctcgtgtcggacctccgcgagggcggtaccgaactgttctctggttctctgaatttcttccttgtgtatttcgtcacggagtctgatctctcgcctgagtttggcgatctctctcaccaaaccgccgacgtcgagctcttcgcgctcggtcgcggcgtcgtccgaagttacctcgtcacgccggtctcctagctcaattctctccttttgctgggaacgcgtctttcgtcgatcagtgtcaatttcctgctcacgagcgtagttgttcggtggtcgagtggtgcgtttcggtctcgccagtcgcggtggcgaatcttcgcgttcgtcacagtcgggcggttcaggggttcgcatcgcggcccgtcccgccattggtcacagtaactcactagacgcgctcgaaatcctgatgaaagtaccgagagacaagctacagtacttcccgaaactctttatactgtacgagctatacagtacgtctcgaaaccggtgcaaccacctacactcttcgattgtttctctaatcttgattaccaattcacgctagtacgcattagtagtttttccggagcaccactgcccatgggtattgtactgtttcttacgtagagtacctgccacaaaggtggggtgtattcgcttgtaatattaatatacacctcacacctccgtgccccaccatgaaatacgtaagaaacaacagatgccagttacagtgagacctccaaagtaattgcaccccttgacccacgcctcctgattacataatatactgccgtacaaaaactccataaattcaatggtacctagtacgatgtataccagccctcactttcaataatagcctgtacacgacggggcatagtatcagatagatgtttcaaatggtccagatctagcctcccccatgctatttgggccgtttccgcaaatattgcctttgtttcatcgttgtttctcatatctaatagatcaggtcgaatcttatagatttcggcctttagcaacgccggaggttctcaattggatttaaatcaggagagtaaggaggccattacataacctcaatacccatctcgcgtaaagcgtcccgaacaacgtacgcagtatacgttggggcattatcatgttgaaaaatgctaccctcattggcaagaagaatagggagattttcggtatataaatcccgaataacgaaacgatttacgcctccacgttcaggttctgggcctccgaatagtagaatcaagccggatcgtcgttgggcgccggagaatgcagcccaaaacatttgctggacttgtttcccttgatatggaagaccttgaacttggtgaagccggcattggtcctttcgtcgaataaaagtccattctcgacgaacgccaatcccacgttcgactgtacattcgtcggaccaaaagactctggcccagtattccggtgtaaagtgttcataacgacgggcccatcgaagacgctttataactttttcttcatcaagatcggatcgccacatacatctccacttccgatggtgttcggtatttaagagtcgtcggattgacccttttttgactgtgtaagagatctcagcaagtagatcttcataggtaatctttggattctcaataataacgtcaaaggacggactttttcagttgaatccaggatagttggccgaacagagcgtggtttcgaaacaccggccgttctctctggttccttttttagtatatcgtatagtagacaatgggatttgcggataacgggtatgaatacgtttatacccctacccaatagtatgaagctcgcacatcctctcacggatagctggggtgagctcggaggagcgagctattaaaaaaaaggctttgtagataaatatctaacagtaatgagaataagaatagggattattgagagatctggggaagtaaaaacataactgtacgcgcgacgcgacctaggattagcgtatttactatggcggtgaagctaaaaatgataggcggtaagaagatggatctaggggggtgcaaatactgtattgccttccccaaccaaaaacgagccaaacccaccgttatgtcatccaatatccgacatgtgatgataatgcggggtcaactttcgtaggccagaatccgtcagctattcttcatcaccgatcacaaacgaagaacttggtttcgatattggtcgagaaagaatcgtactccaagattccaatgcagaacataggcttcgacaaagcttgtgccatggagcttttgcagcgtaccaacccctttcttgaggaaagaggtctttctaaacactcatgggccgaatcccccaatgctgcttactctggtcccctccttcgggtgtgggacaagttctctggcagtcacccagatcaatcaggaagaatgcaggctcgtttgcctcgggagcggttgggctcacaagaaagccgaaaagaatacctagccacacacgccaactatcaaatatgggagccgacaccattcatatcattttctgcgtcggcaccgggtttattaaggtttctgtccaggcgaaaggggccaagcttccctagaacacttacggctataaatccaaacgttcgtatcgcctatggtctaccaatggtcgaaatggaatcagaattgaaatattatgaagtgcaagacccatatgggagggcttattcttattacaaaggtgaatatctttgtctttgggaggttacgcccgatgaggttgtggcacactgggactgggacgtccttattgaaaacgatcattggtacgaggacgagatactaccggctttcaaggagcataacgatctcttcttgcgcagaagtcggattaaagcgacgtttgatatgtcaacacttgaaagtgctttgcccagaatgctccctggctcagtcgacagagacgcactatctgggtcggatctggaccattcgagccaattggacccattatccaatgaggattggaattcttctagcgaggaggagaattggcagttcgaagacgatgcttattgggacacggacgatgaagcagaggaagctaacgcaattgatgatgcatataagattctggaaggcgactggtgaaagaatatccttgcagaacaagaaatggcagatattaggttgctaggtgttatgccttaccttctagcctggccctcaatgaaacagcaggtctattaacatgattgtattagcttccgccatgtcagaacagagcgtcaagtagagagagctatggctgacaggctgagtataatgatgagcaggttcatgagtagtctgcaggtacagtacgcaagtaatgtaagccactacttgcaaggtctggcgccgagtaatacccccaacccgtcacttggacataggagtggcagagggaagtgtcaggttgctaggtcctcgaggcaatccctagatctagtttttgacatgtttgcatttccatagaaaattctagttcccttgggccgccaatgcaatgatgagacaaggcaccgtatttaatgtaagtcaaataatagtatcgagactgatacaggaatattaatgttccggggctattcctaatgtgttctagtgtctcttgggagtggggccagaaagagtgtctgagattattcttgttgcaccggtttcaggacgtactgtacaataacgaagtgattgttactaaacactgagacaaagtggttgaaaatagtcagacatgggcaaatcttaccccctttgctcgtagctgaacttggctttgtccgtaggaagagctgccctcgcatatcgattttccattttcagcaaatacaccatccaccgaaaatatctcaggagaaacagctttcatgtgatctaggagcagatatttgatggattcaccgcgcctgacgcatgactggatccatggcgacattccgtatcggtccatggtattgggattggcgcctcttgagagtagcaggctcaccaagtctctgttacctctaaagacggcaagccagagcactgtttggccctcgcgatttggaagatcgatcttgacacgagggtgttgaaggagctggttcacaaccgcagatgactctttcgccacactataccacagagcactctcgccatctgcgtttctcctattcacgtgcaaatttttcttacgcaccaagagattggtaattagctccgagccatatttcgcggccgtcatgagaggagagaaaccatcgtgcagcgcattcacgtcggcctggtaagaaagcaaggtctttgcaaaggcgcgattggtgtttctagcggcccagtgaagcgcatgatctatagaatctctgttgggaagtcgagaatggaactctgcacgacattgtcaggattcggaaggctcctcttcatttcataccatgattttgggcgacggagttcagtggaaagggaaacaacgtgctgctcagatgatttttatcggttccaaggtgacggcaatagataggaatgaaagtgatgtaactaagttgttaagcatttttgaattaagagcctggcaagcgcgacatacgtggaaggggagaagcttaaataacactcgtggtcaccggccaagcatcagtttccccctacctgctgacgcaatcgactagcggtcctaggaacgctgtctaggtttctaggattgctgctcggttctacagagaccaaatccataggagacatgtaccttgcgatgctaggattgatattctatgatatttgtgtgggacgcagcttccaaataagccattgggtatccgaaattatttgtccgtccccgcttcgctgatagcctgcgtcaatggagcggacttgtctggggtaggggctcttatagtgcacatgtaggtggcgccagtaacaggaactaaacgcgatcaagcgtaatgattcagcatcggtcttcatctataggaacattacaagtatacatggtcacgcgtaattcctactggtggtttagtctgtcacgtgctctttctagccactttaggttaagcgcggtatgtgcccagcgaaatgccggtggtgattgcttcgagctgagtacaagagtacgcaactacgcccttggctgatggagctggatcctgctggtagtgcaatagtatttgtatggaggattaaatagtgttccgcgtacaaattcggttggcgtacaacaggtgcaactgctttgtgaagggtgagcacaggatatatataatgactggtatgatttgaggtttcaaccacgaacctagtgaacatggccttctatagcccaggatagcccttcgcgcttgctatctccagataatgtattataaggtcaatacctgtgtttctacacgtaacaacgcgtttttgcacgagcatagccgcgttgcgataggcgcaaagtgatatttcctaaaacgggggttcaatttcagacccacacaggagcccctattggctggagcgctagcgctcgcaaggtagcaccaccacgtgatcgctatgtcagtcaaaacacctcgtcgcgtatcggagccggtattcctagcgccatgctatctgtgctatcacaatattcacgttgcctgcctccatgcagcatgcccccctcatgcgcttcgtactcctgcaacacctgcatagctttggtgatccctccactgatacgaaccaactcgtcttctagttgagtttctcgagatgaaatactatccaactcgtcctggagttgacgaatttttgcgtgtaatgtgcgattctcgccgagggactcctggagatggatgctggtgcggccaagctcgttctttatttcatgattggcgcattccaactcgcggatctttgctgtgaaagagccgtttccctcctcgtcactacgggctggcccagactatattcaaatttagcaccgcgttggcttcagacaactgccaagatctcaatgctcacctcttcctttggcagatggtcccgttccaatcgggcaacctgtagcgtctgcggagtaactgcctcaagcgaccggcccaattcctcgcaaatggacctatacaggcccacgcttccactgctcaagttcgtctgcaacaggcttttcttagattccgtcacggaccaagcgtatttgtctccgactgatggctgtaggcggacatcgctgggagcgacgacaagaccaagtcgatcatctgacgattagttttgctcatgaggcagaggaagactatagcatacatatatgggctgccaatgcctcacgacactgttgtctgaagaaagcgcgcctttcattgcttgtgaggaccatgattgtatttgatctgttctgtcaaacaaggcttaaacccttgatatatgctcaggttaggcagtagagatcatatacctcgacgacttatcggctgaagacgatctgattgtcgctcaagcatcaaaaccccagtggggccaaccggttaccgatgaccacagttgaccgacccttggaaattgtcaactggctatgaatttctacgacaattgtattagcaataatcgtcagttttgtgatcataatctggagatttgatgttttcgaccatgagtcctaatccaacttctgccgcttgttggaccgggcagcctttccacccaaaccacgctgatgctgctcccgatgatcgatacgcagccacttttgtcttcggaatatgactgaaagtcgaggcggtctagtccaaaaatgttccaagaagtcgttcttcctatctcacgttagcgtgatcgagagcatataagaggggaatcgaacagaccatggatatccgaatctttgggaattggcctgggcttttatagacggattggacccaacgagcacccaccctttagtttaaacgggctatttatcaaccgttcaagtccgattttcgtcaaacctatccaactaagcgtttattatgtctcttggtcgttgtgtttttgcaccgtcagattgtttctccaaccatcaggtatccgcacctgggttcagagtaacttctaggcccttgactgtcagttagatagcgtagagggtaaaaagctacaggatggatcgaaatcagtttcaccacttgcacacggagattctttctcgaaccctctttcaaaacacgctatgcctattatagttactctatccctgaccccgtttcttggcagtattccaatacaattgtaaaaaatacacttggattcgaaattggcttccatattcaacaggcacagtatctcaaaccctgccactgggaccatggtgaaactacctggtcatttagctagcttacagaacttccttcgtgtcacttcaatactgtaaagtacctcacaaggcttatgcactacgtttcctgcatcatttgattaagtattctttctgccaattttgccttggccgcctaggcgccttcctagtaacccctaaaaggccaagacagatgcctataggagcaaaaatattctgccatttatttccgtcttctcggacacataaaccaccacctgttccccataggttctattctaccatcctcgcatcaatttcgacttgccatagtgcacggtacaataatacgacatggtgggaagacaagtatcaatgataaaacaagattacggtgaaatcggccaatcattaattgatgaaataacggatacattgcgtactcgcaacgcagcgtcgttactctacattgccgaacaaaaatgctttcagatcactggcttctctgaaacacagcgaggaaaatgcgttgaaatactctctggagtgcaatctagtgcttaccacttaagaatcaacgaagaaaccgaccaagacatcatacgttttcaactcatccctattttaagggagagtggccttgaccggacagcgtacgattttgctcgatccgggcaaaattttatccaagggcagcgcgactcccgaagccggaatgccatccgaacacgattggagagactgcgaaaagagcgacagctatcacctcgaaacctttgatcaccttcgtctcgtcatatctacaacaacaagggcgcaacctaccttacagcaatgtggctagcgctcacaaaaccataacggtagatatctcgcacggcgccggatgctccgaaaatataccccaactctcgcgcttgcaccgacgttatttgtggaaatccgccggacttttttacgctctccgtatgtgatcaaaagaaggcattttaattctacatatggcactgaatttctcgccgcggattcctccatgcaattagccattccgatcgaaagttttgggtttctcgtcttttgcgtacctcgccctcgctgttctatctcggctcattgaatgtatcagtgattgttaaataaggatcccttgtctcctctgtgtcatgccaattgaatgtattatattcaaatgaaatctaattcctggtgattgactagttctggcgtcttgccaatcgaaatgattggtaatatagatgatataagctaaattagatcacatgatcttagtaagcacatagaataaccgcgcgctcagagatagaataatggactgacagatgcatatactcgactggatatctattggtccaacttcaccgccctgattacgtgttccgacatgaacaccatagcacgtgataacgcctttcaatacgattcaatacttgagacggagctaagtcggaaatggattagtgtgtttcgcactagggttcgagatagattttatgagtgcaaagtggtgaaactaatttcgatccatcctgtaaaattggtttcgcactaaatcacaagatccaatttttcacatgactatgacactatgggacggcgagtgaactcggaagagcgtacaatacaatcaaagtccttgcgccgccatagtatgggccgtgctgccgactacaatcatcaacttcttgcgactattatgtgaggagcgacaggttatggatatgcgttgaatgtggcgagtgaatgtgacaaggaacactttatggtgaacgtaaggtcatggcggcgataaatagcatcgggagccccagccaaaagcatcacctctcgcattgcccaaaataatgcctctcatctctcgtcagccaacgcaccccgcgggagacgaacttgacactatgcccttacttgttcgccgccctaacacgcggccatcgcgaaagtctaagggtgccaacagcccagctcaatcaacattgcagcgagaccagcctacgcttagactgcggcttcagcagagatgcatgacgccggaggcgtggtggacgtctcttaccgcgtttggtgcacatgataatatttctaagcacatgctggaacacgagaaagccattgccacggaggaaattcgacaggaatggatgcgacgtctgcggcccatgccgcaccgacagaacccaccggcaaagaaaggaaagggacacaaaaggagctagcgctgctctatcatacagtacctggcggagaaacaatgttccaagggaacgagccttcaattactagagaactatattgtttattgtagatgtgaatggtaccatttcacgatatacaatatttgcttcaatatacagccatcaccttgaataaattagaaagattcaaattgctctgtggggatgacataaccagtcaaaagtaagcctacagatctagctcaaccaatggacgtctctgtatgctatcccaaacgagcgatatcgagatgtagcagtgtgaagaagcaatagagatcaaatgctgcatatttctcataatgaaggaataagaaaaatgccgtcgctataggtatatggaggagttactggtgggaagacgccgacgctgatgcccactaacaccatatgaaggcgatatccctgacggcaccaaataacgtcactgcacacgaagcggtttaatatcagcggttaggtattcaaatgtaggtctataccagcaaatttgtatggtagctatagggagtgaatgttggaagtcggtcgaatgcaagtaactaagggtctgttacccagtactactgccacggtgaccttggtctagccatgctccaccatgggcagccgagtgagaagacctatagtataaagagagactttcccaacagcggaatgaacgtatttgccaacacgatcagtcatggagagccccagcaaaacatcagaagtcacaggtacacaggtagaggcaccgctctacacacagccaagtccaaccgaggagcccccacttcctggtgttccaaccccgccgccggtaagaatagaatatgaatagaccggaccacgctgaccagccagacacaaaaccacgacatagagaggcagactttgactgtagagcccttccgacccatacttgaggtcttgaagcaaattgaagaagaagatactgaacttgcacttcgtgctgcacatctggtggggtacattcgatgtctgtgggagtcttgtgtttccaaacatacagacatccagcagctcgaagaagaaaatgagaagctgcggactgggaatattcagctgtgcaacgaggggaaccgtttgaagcactgccaagatgagcaagtagcccgcttgcatgctatcgatgatgcgttggatgaagttcggggaaggcttatcggtgtgctcaaagtttggaacgagcggtctgtcggcgatttggccattttgccagaagatggatttccccgatgttagtcgttgctgtcgaacaggtcaaatttacttcaaagctttgcaccgccgcaaggcttcaagcaagtgttcgatgatatcaagcatttgctagtcctccttataaatcccttgaatctgtgtgcctaaacttcgcggactaccaccgttgctgaacaagttgattgttcatcgactgaacttccagcacttcgaacagagtaatatgacaagatcatccagatggtcagaatgcataattgcagctgtcaaagtcagccaagagtggtatttctttgtacgcgaccaaatttacctctagaaataatagccagcagtacaggacaactccaaagaccgcaatcagaagaagcacacctgccaaccccattgcccaatgcaaagcacaacgtagttgtaacccagtccgggaaccggccgttgtatactcatccagtgaccacaagagataggccaagctcagataatccacaaagtgaagaaagagtacggcatgttgcagtgggaggtagacgtaaataccaaccagcgtggctgtaatcttgatcaagattgaggaaaggaaaaatagtgaaaaacagatcaccaatcgagatggcgtaccggtgaggcttcgcagcaggatgctcattcggagagactgatttttggtggttaaattaggatcgagcaataatatttcagacgcacgtaccacgagtaagaacggaaagacgctggatatcccaagtattccctctcgcacagcctcacttatttcggcccagctcagtcccacataaactaccagtagaacatctttcggtacagataccgcaaggtcaagggccagatgtgaaattccccgggctgctcgacgagacaattccaaacggacaaggctggcaattagcagcacggtagccagggctgtatggaacttaggcgaaacctgcatgactggccgccgttctcgcaacgtgcaagtgtactgggactgggttgaacttatacgcaggattacgtgctactggattacttgtgatatcatgaactggggctcaataatcatgccttacgatctataatggtcgcatataagttgataccaccgagcctccttctaggagccgaatgaatgtccctaggaacgggacgggtgttcctaggagcccagaaccccccgggaacacatacttggatcccgggaaccagctttctactcccaggcaccgagcaactttagcgcccataaatatagacacctattgattaaaaatgtgcccaacaagctaagtactctgggagcgagagtgactctcctaggagcgaactgcagtgcttaccacacgcattaaaactttctgaaagctcttataagataccttggtccccactgtgttaatagacagacacacttcctacaccgttcaatccttcaaattaacttattatctcatcttcggtaagagcttcatagcttgagccaaacgacaatatactgaacttctttccaaaatcaacagctcactgcgttcgcataatctgtcgagatgtctcagtgccagaaaggaatttcgttattatttcgtcacgaaggctactacgagatagcatgcagcataatggaacagctgacggcttcggatgttggcgctctcttagcttcacttcggattacgccagcccagcatacagtagagacgttcctacagccactacgagactttgaccccacgatgcgacagtttgagtcttggttccaggacaaatgccagatactgatcatcggcccggacaccattcgattgagcgaccgaatcttcaatgcagacgagtactacaaagggaagcgcccaagtcaaacccagctggaggtgtggatttttgcgatacccgccaattttgagaagagtgctaaggaagtccaatgcctcaggcactgttctcatgcctcctctttattctctatgcaggagcgcgcagaagcactgattgctggacaagagcttctcgaaaataatctgatcaggcagatcagttatacagatgccgaaccaagcaaagtacctggagagtacctagatgtcaaaattttcgatctttttagcacgaccacacatcggtatttacacacaacacatctaattgggcttgaatttgcgggaatggaatttggcatcgagtggaacatcaaggatccaacgtcgaaggaccactgttggaaggcaagtcacggaattccttacattgaggctgctagccctcgcgacaccaaggtagccgtgaaagaccgtcggcgtcatcaaaaaccccaaagcctggtattttaccccgtgtacccggattgggatccacagtcaacggtttctatccctatcagctcgtcctgaactcttgcgttttgtcgcaacaggtgtgttgttggttggtcagttgttaatggtaatgaacgagtactgtaatagaactataatcttacgttgatatagcggaagtacttagggctcgatgacaccgacccaatagcagtagatacggagccagagacaagtagattccaaggccgcggtcttaaggccttgcaggccatcagattgccagctggcgtcccctacaattccacggcccgcttagccacaggcctcagagctacagatccctgatggctcaagccctgatacaagcctttaacgtgaagtccggttgcgcgagcgaccccaccaaaaacccacttcaataataatgcatcgtctttaaccacaacaacaatgctgccccccccccctcccccccccaacgctccgataagaaaagaaatttgatagagcaggagggtcgccttttattagctacacaagctataaaaaatggcaaatatccctcagctgcagctgctgcacgatcttttgagatacctgtctcaacttttgaaggtccagaccaatgggcgcgaatctgctactgaaaagcgacacaaccgctttattcttaccggaattgaggaggggtcgattgaaaaatggctactggatatggattccagaggggtagctcttaacttgcctatgttgcgagatatggccaatcttctactttacgcccgaaaaactacacccactactgtgggtaatcattggcctgctgaattcatcagacgacgcccaaatctctctactcgcctctctcttaaatacgattatcagagagctctttcagaagacccttgaattattaaaccatggtttgatttggttcaaaggacgattgaaaaatggggcatcgcttcagggtagcgatagcgatccaaatactctttggaccctctcaaagtttacaaaatcgcaatctcggatcaaaaaggtctagaatcttctgcttcaattctttcttcaccaacaaaaagggagattaatatgagaggactataaaagtggtctaccaccacatgtttctctagaatcgctgtaccctattggaggctaccaacgagcaacagaccaaaaagcgagagaccaaacacaagtttactactcagaaaggcatatttgggggtctagagggtggcgaggatgatgtggttgttgaggatgaagatagaagcaaagatatatcttcaccagaggtgcctgcaaaaccggttactgagcctgctttaccttctatgcccttagttcggcggcaggtgacatgtcctggctgtggcataaaaggtcatacatattctaaataccctacacgtgttcaatagccaaatttatgtttttttctgtggttttaatagtggttaaaaattgaaggcttttcaaggtttggtggggtcgctcgcgcaaccgggtcgcccgcgcaaccggacttcacgttagaaccaattacagtgctgtgagggtctcatgtatacatagaggtagataccgtctggagataagcaatcaaaattaagaacaactatgattgactccagattcaagacgtacgaccaagaagcaaaagaaaggtacggtaacttcctcgcgttcagggggaaccgagatacactacgtgggtcgaccatagcgttcatcctccaataatcgtatatgcgtcatttctgtccctgacaagggccctagaagcaagtgtcgcgatcccgggagccagtgccttgacattcaaagtaggtgatgtcatgtcgaatgataccggggtctatagaaacgtcagcaaagctacatcgtcggaatctagttaaatagatgccatggccgcaaagactctcaagcccaccattcaattaccggaagttatacaacgtcttcgccatcagagaagatcaaatgcctccacagagaaggccagtggcgttgcagaggcccttcccattaccgaacgttcaccgaggtcagtcgctggggtggaagtaccataacagtcctgactaacatcggcttagacagacaacatccaactcaaagagttgagggcatcattacgagcatatatgctgaaatgtcgagaatgcagcatgaacaaatcctcatggtgcaatttcgcgacaacatgctgcgggcttacagaaatgaaaatgccagtttggaggagcaaaatcggtctttgcttgaacatgtcaagagtcttcagcgagaaaattgctccctagagctcaagcacaacaaactgatgtctgaatgggcaaaggagaggctgcagtacccagagcagcccgatggaaagcgaccttagagaactgcttgaccagatctgattaaccggattttgcatcaaactctgaggtactcggaatattttcacccgcgagtctgtgaatatgaaggaagaagaggtacctagaagggttagcgacgccatcactaggtgttcaacagggattgcgtcgaagaccgagcgtgtaacagtccgtttgagcccgcaagaaatgtgccgaagaaaccgcagccaccttattactcatggccacaaagccaagttcctcaccggggtagcaatagctgtaatacaataaccatgctttactataagaataagtggtctttccctctagcttggcaaaacgaacagaatgcccccaaccgggtcaaagtggtatcgatggattgatgatacatctctccccaacttatatgccacttcagcggctataatcatagcaatttgcttgctctattggcttgcacgagatgtgtggctctgggtgtggacaagacgccatgtgatctcccgtcgccccttccgatcgaaaacgataggctcttggaggcgacttgccttcgtccacctgccgaaatgcctgcgttggcttgacatccccaactaccgggaagcgctcatcctaactgtcatgctcgcggcaaatattattggcctccggcttagagcccattcttgggcggaagcacagggtagggctggctctttggcagtcatcaacatcgtgcctttgtgcgccggtatcagctttggacttccagcggaccttctccacgtgggccgccagatactcgcgtggtttcatcgctgggtaggtcgcatctgtgtgctccattctctgattcactgttcgctgcttgttactgtcgccaggacgacgaacctggcgacctcacggcacattgttccaatagccgtaagtcaaagatatgtgttcctattgcgtatactaacatctcatcaaatataggccggttgtgctctctttctcgtgataccggttacttgtgcggcggtccaatggcgatacttgcagattgcgatgaaatgtcactaccttcttgcagcaacggcgattggcgcgcttatataccatctcgtggagcggcagtcactgtatcggtggtacctggtaggcgccatctacctgtggtttttcatcagcgctgttgtctgcataatggccgcatggaatcacaaaccttggggatcttcccaaaaggaggtagtcatgaactcggtgagccattttctctggctggatatagagctacccctcaaccgagcgatccgccctggccagcacgtgcagctttggatgccacgagccggttttcgggctttctttcagctccctcggttctatgttgcattctgggaaaatggaccaacgcaaagaatagtccgtatggtagcagagccgcaacccgggcttacgcaaaagctgtatcaccaagcactgaaatccccggccaagcagtcggttatggtactcggtccctacggacaccctctcgatttctaccggttcggtacaatcctcttcgtcgtggaggatattggattttttcgagcgctttcatacattgagatgttggtggaggcaagctgcaggcgcgaagtgatggtgcgaaagctcgaggttctctggaagcgccaagttggcaaagatggtatgtttcatggacaagtactttcgggtcaaggagccgcctgttgatcgggcttttccagagaatccacaatgggtaaatgactggatacaaggccttttcaatcgcgactggagagcgttcaaggtggattttctgctgatgcaactcatctgaaaagtcacgatctgaccattctccagattttgcaattcagcatctactgcccgcgtactcagactggaccccagaacaatatttcctacgaatatgccgaaaggatttgctacttttatggctcgatcaaaatcgaggaagaagttgaacggtatctcaacaaccaccaatgcggagctgtggccgtagcgggtgagtttccgagttctaaccttcaccccctatcgtgggctgaataacaaagttttgtgcttacggtgcttaccgcctatgcagtatgtgcgggtccgtcaatacgtgaggctgtgacaaagactatacggctacacacaggaagaaatctccagctaatggttttcgaccccgatatgtgtcctgcgccggatggacttgtagattcactcagcagcgatgagactccagctggcagccaggatccaccacatcaacttttgggagtaggcgaggataggcatactcaccaagtacgacgattcctagcggacagcagcaagctacagtacccatcgcctaaagaaatctatacggaagctggaaacgtcgaaatgaacaaccactcgaagtgggtggaaagtagattggcacaagggcgcagaaagcctacaaccactaaaccttgagattgtgccagctttataatgcttgcgctctcagcgtattgatagattctgcagcttactggaaaccatatcatctgccgcaagttcgtatatcacagggagggcatgggaagcttggagcctggccttgattgccgcacagccggtccgccttcgcgagcagatcccttcctggggaaacattgatggatatcttaagtggttgatatgatagttgatatgataggaagacgatcgccgaccatggcaaagctggcagcgaagcgtgccagtctcgggtaggatggtgtgtgcatttcgtcccgcagatccagcacactccggagaaggcactgaactgccttctcttcgagaagatttcaagggacgaaaagatctcttggctctattgcttagaatattagtatttgcaacgcatagatcatgagctcctcatactttgcatctatccacaatttagtgccaataaaccaattcatctttgtgtgcgcagagagcttagttgaagactttaagacttacaaaagcaagtgagccctaaatgtcactggttataaagtatacaagagaatatagagcgaggtagaccttggttcatggaagcctttccagcctaagtcaagcggtattgttgatcgcacgcgaatcatattatttggaacccagaaaacacacgcataggtttaggcgggaaggtatgtcttgacaaggaatcgaataagaaaagaacgatattgtgaaatgaaaccgttcaactctgcttcgcttgttattggccggttggaacccggttgaagtgtaacgttttgagggccatgaacacgaacacgtaggagacatcaatatgggttgcattgttcaacctaactcaccattagccctccgcttctttagcataagggaaaggggttggtaccattatttgcgggagttgacgtcccctgtctaactcgaccggtcattgttttgaccgacggtgaatggaaccaccgcattaaaacacgcccccacttacctgtcaccagttgtggaacaaactaggattgcccacagaataaatgaaaaaaatatatgaggaataaataagaccgccattgcattttgaggttgttgcctactgaacgaaaccacaaaaccataggaacatcgaacatcaaagtagacttccgcactagccaatattacacaccgagatctaaattaggttccacaccatcgacagcatacatattcattcctgggtcaatccaaagtgctccaaaaaggtgcttccaccgtcgctgcacgtgtgccattagtgatctcgcccttttgtgccggttggccggttataaagttgcaagttgtgcagctcaaacgtctcacctttacaactcaaggcttcgttacaaccattttgtcgtagcatgttattccaatttctgtgtctgttgaaatccgtgatcaaatcgatgaaattacagctcaacgtgccgattgtatattccctagtgtaccattcatcccaaagttaaaacggaaccaccaagtagtgccagacgcttggtgccttgcaatggagattttggacaggatacaaggcctcttctaacaattgagcggtattcaagaggtagccaagtcggtcttggagctcctcgattggagctactgttcgaaaataacaacaatgaacggttgatgttctgattacaagatcataaagatcatagtccttatgtatgggaaaagtgaacctaccaaggatctttccattcacgcacgagccaaatatcgctggctttaattctaatattgggaccccaaagcattggaaaaggctgctctatagatcggatgagtaagcaaaggcgcataaagtgttgccacggggagcgcacgcccgtacggatgtgtacccagccagcccatggccaaatattgatagccggagaaggccagcctaggctgacagggtgaaacagaacactagtggcgaagtaaatatttctatccaacgaacaaaagaaaaatgaaggggaaaaggttcgaatatcctccaggatagtacattatggttgaaagcgaatgacacgcgaagcttggatcggcgtgaaggaccctggtgcaagtattcaaacagtacgccgatgacaggcaatccatgagagcaaaacattcagagttcccaatttcccaccatattctgtacaaaggtctgtgggtcaaggaatggcatgggtatagaagggtgaatgcgagataaaggaaccgaactccacggggtagaattatctgtgatctctacccgtggccgtatagctaactgaaaccgtgattgtccagcgcttgttatgtttcccactgtagagttctgcgagaggatgtcacttatctgacaacgtatccttcgtaagtttcccagcattgactcaactcgtggaagaaagaacggatactcttcgacagcctctccggtttccgtactgagcttactgagccggagttctatccagtccacccgctcaaaaaggaaaaatgccgatacataaaggaaaatatcatcggcgcaggtgtcttgggataatggatctggccccgtccagctgaaggagcggacgttctcgtagctgggatagaagacacattcaatggcaggagtccccttatgtccatgctgagtatactctaaccattccttgaggggttgatttgagcaccgagtgctacggttttctgcgaggcaaggcggcggtgtcggtatgttgggaaattctctccaaattgattcaagatccagatccaaatcgtagtctgaagggacatcagcgccagtgttaagtatggaagaaatccaactaaccaattcgatcaagtggtcccattattcccatgcaggaagtacagcgttcacgataaaagacagtctcaggaggtaaggataggaaaatcttggtggattcatggggtctatatgtagaggtcagtatgactagctgctagggtatagaaagctcaacggaaaaaaaaaggtccaggaagggtcttggccatgaccgtgagaaggctatgttacccagtgatggtggctcctggtctacgtaggagcaaacggtgaatgatcttgtttcctgctgcaaatgtactttggtgaagggtgcggaatgcccgccccacacatactccacccgttgaactatctcgaccgacaagaccggtcagaccatgttctttgctatttatacgataaccaagaatttggccagacgaagatagcttgtttaatttgctcctgcacggtgtcattgtagctcatttatctgacacgagggcctatcactattctgtagtgttccgagaacgccctggtgtacggagacaaaggcctgatgatgatcccacagcagcagttcttgatgattgcagcactgttgaagcttttcgttttctctcaccaaccattcgttcgagttttgcaggaagcgacgttcctcttccaagcgtatcttaccggccgacttgatcgtgtagcactcccatagacacagatagaggtcgagaaggtcgacggcagaggacgactttaaagaaggatggctttgtaggatctgagacatgttgctagtcaaagaacaggctgcaccggccggaattgtctggaatgtttggttagagccggctataagaggtgaaagagaaacctaacgcttgtcttgccccgtgacgctcgtttcaaagagtctaatacctgttccgatcttcctggcatgtcaacggggataaaaaactgatctggaggttcacgttttcttttgttggctcgtccagactgagacggagaagcaggagagtccattgagccgtttgggttccaaagctcgtcgctatccagattgtagaaaacagggataggagagaacaagctcgggtaaactgtatttttatatcaatggtcaaggagattatgatacaatagactaggtcctacggagattgtatagggggcacgttccagctacttggatgataaacacacccgcatgaaatgcctcattcaccaccaggctcaataagaggatgccttgctaagggtggatatccttgtatttccccttgacgacgccctgtcacgatcgtataaatgagggccggcaaggaatcgcgggtgcgcacataaaccggttaacatttcgctgaaattgcccgattttacaggcgagaaagctacgaatatcttggtcagggctgctagttaatgatgagtacaatatctattggacttgcttttattaatatctggtcaggcacgacgagttcatacacctacagtgggatactgtaaactgaaatttagaggtgcaaattatatattatctaggtagcaatacgagtgcggcagatcatgatcaaaggcaaccgccttctttgaccaaatccatcatgggacgcgttgcgccgcgtagtccggcgcgaaccacaaggaaaaatcaagaaagccacatgcagacctacaactcgtacggtgactccattaacccaccccctgggcatgcggacagaaaacgagccccgtccaccataacaccatcccaaatcgaagggtcactcatatctgctgaacaaaagggcagccgcgtcgtatcatcgaatgcaaggccggcaagttccttgccaccgccctccgatgaaggatagacacgacgcattagaaactgctggctcctgtatcgatcaccgtgagagaagtccccaaacgcgagaacctgcagggccggcagtccgtcggggccaaatacccagtctgcaaatgacacgaaatcctcagcctctgcaattgccgcagaagacataagcactgcctcctgcgagtctacaaagtcgaggtgtgacctgtcaaagtactcatcaacaatgggagggtagttgtggctatcattggtgacgtcccggttcacggaactccagcacgaacgaggatgccatgaatatcctttgcgcatcccatgtaggtaagtggtaatctctcgtgggatatctcgatgaaatcgctcgaggccgctgaaccgcagatgtagaatctgaagctgggaatgcttggcagtaggtcgaaggcaccgacgctgttctcattagcggcactcgttactggaccgaggaaaacttacagccgcagacggactagcacacaaagccagagcacacacctggcccaggtctacaccggtagacaaattcgtaacccaagcgggcgacacatcccgatcatcctcaaataagccatcagcatcgattggtgcgagttggcgctcatggtagacaaggcttttcaacgtggtctggtggtgttggatggtgtcctggatgtgggattttgacgatgggaaattggacaacctcaaatgcagatgctgcagcccacgaaatgaacataagaaccgcacaacagcagaaaggccacatccttcgcccggttcgtgcagcagataatcgaaagagaattcgaaatgcgtcagtcggagcggcttctgtgaccaagacagtaattgcacgagatgcaactgattcgggcagtcacgcagcgtaagcgaccgcagagagtagaatatcgtattgtgtcccgatgagatatccaggggcaaggtcacctttgacaatgacagcgtggacagagcggaaagagctgtgggattcgcaatccccgtatcctcgttcgtagtgacgccggtccctctacccccttcctcaagctccggtcgctgaagcccaaggctctgccagcacagagcacgggcaaaagccgatggaacgaagccgatggacagatgatctaggcagctccagttctgacggatgcaccgtcgcaacaaatcaacctcggacggatgttggagtccttcccactcaaacgccgtcagacaggttagtctggacattccttccaagcggtgcgacgtttcagggcaggtcccatcagtgacgagtgagagacgagtgaggcgctgttggtactgactgagatagccttcctggtcaagaacccccactggaacacatgtccccagtcgccatctattgttagtcagccacaggtctagtcgataggtatcgcttatactgactcaaatatgctcagtctattcggctccaagtgggtgaaaatcagctgcaattgatccttcacgtcgtccaggaattgctgatgtgccgtcgcatcatccgatgctcccagcggggccggggactctggcagccccgcggcacgaaagatgttgtagtatgcacatcgattaaaccgaacaagatggaatggagccctgatctgtaggtgccgcgtgtgctggagatagtccgcggctcgggaaggaccgagatggcgaaagaaggggtcgacatccaacacattcagtgcccattcacttgctgcacagaatgaaactgtacggtatatccgaggaaccaacactgcatacaatctggacgaggcgcggctgagaacgcgcagagtggtaactggcagctgacgggcggtcagtacctggaccaaacaaaacaaacatgctgggcttacccaatctgcaatcagcatcagaatctcacacggcaaggtctccagcattgtcctctgtgctcacttcattcatccgctccggacagcaagaggcttataagcacgcatctatctgagcacccagtcaagttgcacagacattgcgcagaggaaaatgtctaaaatctgtgggtcatgcatggcgttggcaagctatttcatccggtcactgataaataggctcagtgccgtttttgcagccgctcttcacccgcaggccgccaggtcttgtgaagcgcgttgtcaagctcaatggtcgttcggcatgagcgacaagcaaccaactgaccacagcggtggccatggtatcttccccgaaattggcaaccagaatattgaacgacgagtcgtgttcgagaggaattaataagaacgttcaaggggagaacaggtcatgtcggcgcacggttcacgtggggcaacggatcaggtggtggctgaaacggcgagtgacggttgggacgattatgttgcggtccacctgtacagcaatttcgaaaacagtttgctcaagtgccatgtcctacaaaataggtgacagtagtaggtcaagcgagacctgcgttgacccggtgtaaacatctaacatttacatgtcaatgggcattaggccgtttacttggagagaaaatagaagtggaaattgcgtttagggtgcaatcttcgtgtcggcttttcactgagattgcgcaggtttgtcaccaggactaaggcactgggtgatagggtttacctatagggtggtcggttgaccgggcaaaaaccacccacgtctactgtcgtgcaagaggaattgattatcagcacatacagggtgaatggagatatgagctgcgagacccacatggtatgtacgagttcccctgaacgcgaatagcgacaggcttcctcgcgttacgcctgatagagtattcaatgccgactatagttgttcttaattgattgcttatctcaagacgctacatatactatgtatacgtgagcttatcacacaaacaataaattagtctgggaggcagtttgggacgtttgctatacgatacgggggttatgtctcggaaatatatacagattgtcagcgatctgaagtacacaagatcttggctatcacgataaattgtgatcagatgaagaacattgaatcgtccagatttcaacaccagggatgtagcctttttgatcgacatggaaggaatccaggcaagggccagatatgagaggtaattaacaaatgttctgctcacgccgactttgtagtctgccacaccttctccaggacccaatgaaccttaagctgtgttttgagccaccgcatgcaagacagcacttgaataagtgacggcattgtaggccaggactaaatgcatcacatagaggctgggccgccagccatttaccacgccaatcctttccaacggatgaaagagatagaatgtagtgccaagagaattccagatggccatttgcccgtgatgtatcgccaatgagggtgcactctgggatgtcccagtgagggcataaatggttggtatgagcgaaagtaagcccaatgaaacgcagctgtacggaaaccggtaccgcactgcacagcagcttggatcgcagattacaaaatccaccagaatctcgacagcaacgacggtgaaggcagatatgtatccgagctcgaggtagggttcggtgcggaataacacaaccacagaaggaacggtggctgcccaaatcaggactaaagcggctccaaactccagcttttgccactctgccgcatcattgccccggaaagcatctagaaagcggtagaagacgctggatgtgcaccagaagatgacacctgcgcaaaagactagcacggacagggagtccaaaattcctctgggggatgaggggaaatagaagagcagaaaatggatcacaaaaaggtagaagtagagcaatacaaagatattgattatggtgatgattgcaaaatcgtgcaaggactgcgcttttgggtcagccatttaggtcgttggtcgtgtacttgttggagcgaggacatggggaaaactgagcttttaaggtgaatagcaagagcgaagtagctgctgaatcggacgccaccctggcctgtgtattgcccaggacataaccaatgtaacttagtagaagaacatcgtgagagagaaggtcagacaccgtgcaacggttaacaagtgacactaaccagtggctattaaaatgcgtggtcaagagagggtggtcaagagagggtggtttagagagattaagcggtaccagtacagaaattaaccatgctcggcacactggtgttcgtttctggggggcatcatttatgtggtggttagcgatagcctatccttttgcctgggctggccagcttaccctcggtctatctcacgctcatcaataactggcacatactgaaataatcaaacaatagatgcgctctgaactgataattttgcttgtctgaatggacacgtttacaaagctggtcaaaagcgccagtaattgccacctcaattctgcggtccagtagcccacagcttttacatcagtatttattcgggcaaacacagtggaagtttttcgacagatacctctggtaattcgaattcctcaaccggcccgaaagaaggcatcgcatgattgttaaaatattccccgactagttggcgccaagcaatgactctccacgtcctggatcttcagcaatcgagttcttgtcggaatttttgcagtataagattatcaccgctgccaatatgacaaccaccttcccacatcagataacaagatcagcagagcactatggaggaaatcgtcgatatagttcgacagatcggacggcaacagggagaaaatgtgtatttccgaacctgctatgcccttttcaaacacctccaggataaggccgagcaagcgtcccaggacctacttcacctacaccaatccggtgcttttggttcctccgatgacgaattctaccccgtctatcaggtcgcacaagagcttcaagtctcggtgcacgaactggctgagcaggcacttaaggcgcagttagcctgtgaagagttttgccagttggaccccagctattcggcccgcgaagctttcaaatttaccgacaccgtacacacagccggaaagactgaagctgatgcatcccagggtatctgcgatagcccccggtcgatgcggtttataatgctaccagtgaatgacctctaaataaatcccatggatggctgcatgatcgcttcgaagaacattgtcttgcaacggaacatttgatctggaaagctcaagctcgaaagcggtcataatcatacaagttagtaatattagcctattggcttcttttgatatgatgtcctagacctgtagtcctagaatacatagaaggcattgtaacagtatgcctagtgtcactaaaacagagtttgagaaaccattggacagaacaaatggtaaaactgattccgacccgctttgtaataaagcggcggtggcaatggtgtagttggctagtactttgaggcgacctgcaggactcgttcacggaagaagcgattagagaaaagagtgagagaacagtctcaaagataccgtatcgagctctaagccgaaaattacaaagatcttcgcattcaaggtgctcagcaacaattgtgacaagctccgggctcaggtagtcaatatttgcggacatattgagcgtaaatcaaacgcctggggcctgtcggggtgtaatcagggaagaccgccgatgagggaggggcacacgtatgtgcaacagtatgggtattatgagttataggtcacgtggtaagggcttatcatacagttcagtattctaaattcagctgaactaaaggtagacttgtagtatgtttcaaggtagagtttgggaaagaatcaagagtaaaatgttgaaacttattcttgaaactaatttcgagcgtgtctgtatttacacaatagggtagcctgtacatcgccaaaatcaaggagtcagggtaaatgaaataatccatccctgtggtaaagcatctgacggaaatctggcatacaacaatgtatgtaacctcagtggtagtgaacctctaaaaaaaacatgaaaaaaccgcgatggttaaacaagccatgcggacctcgatgactaactgtaatatgcacttttgtatgatatggttggtacgtaccatcagtcacatgattttctgagtattttatcctgtctcaaccatgtattcgacatcaccttctgcaatcataagacattgtggaaatctacaggtaagagatgtatcgagattactttagcaactttcatctctcatattctttatcgaagtcgatcctgtaacactgtagtctacatctaattaggcctgtgtacgtgtttcctagcttgcccgcttgctattccatatccacatcaaatgcagcagcaaaacatctcaattagccatgtcaaaagcgccgcaaaagagaatgttactgctagccaggttgcagcgaatgaatgcgccccgagacttgcatcggctcccagagggtgaaggatactctgtatagcacccgtgatcaacccgtagattaccgtaacgccaatggatgcgccggcgacaaaaatagttgcagactcagcaatggtcagcttactttatccagaaactaatcacagggcccttaccaaggaagaaatgatgagcaatatttttccccacgaaaaaaacattgtggtgactccgaagacaacagccacaaatgttgaaacaaaacccaagatgtaagctgagattgaccaccgagaaacaccgtgatatccagcaagcaccttgttattcccatctggtagtatcccgtcgatgactggggaagccgagcccaaaatgctcaacaagtcgaacgagaaggaggtactgggttgcgagcaattggaataagatgatgtttccttctggccttggcaatatccccaaagccccacagaatagaaacccggcaggtgtgagttgatttcgtctgataaagattgaatcttatcggtcacctggctcgctgcagtctctgcggcgcccgaggcataaattacagcagtagaagcgctattcataacgctgttggcctcactactggctttgtttgcaacatcgattccgtccatcgcggcaataccgagggagcgacgaggatgatcgctcccaatttctggaaaattggtcaattccacctattattttggctttagctaactattccttgagttttatgggatattagctaccttcaagaagtacaattcattgggagaagaggtcgatgtgcatcccgcaaagataatggctaggcaggctaaggccgctatagagaaagccaagggaagtattcttcctacgtgttgcagcattctatttatgccaccaaggaatctagggaagtcagtgtcaagggtattctcaatgaaagcgccccgcacgagcatgtggaaaccatgtgctctttatagaagcgttaacatgtggttgatgtcagaatagaaaaatatattaactcaaagtaggggaactcaggagccatccgtcgaatgtactcattgaagtggaaacggcacggccgttcttaagtgctgttcgcggttggcaaaatgaccctcaaattttgttttcagccagatttggcttaatgtgatagacctggctaaggcgattgatatcacattacagcaggttttactggaacgactggggccttaacagtgagtgaacggtagagaggataacgcctgatttctgaggttagtaggttagctggggcggcggaaatcgactccctcaacctcctgtggggaaggctaaccaccattcatttcatacaacggaacgtataacatcatcagcctaaagttgatgattgctacgatatttcagacgaaatggcaaacacctaaaaatggctctttctttcagggtatttaaatagtcccacccgctcagcagacaagctcaagcatacaacgttcactgcattacaaaatgacacgcttaacacaagcccaagtggaagaagccgagtacaaagtattcacctatcgtgaggaacatttcaaaatggcagcacgggttgatatctctcgtctcgtattcgacaaaaacttcaagcggcaaatgagcaaccgccaaaatatcgctcgtcttgagcgaattctggacactcaagggtgtcaacgcctgatggaggaatgccatgtacctgtattgattcctgacagtgattggcaacgtcgcgttaggccacggctggtagatggacaattccatcaattggatgtcgatatcgactaccagctgcgcggacaggaccacgagaatttaattattgctgcccggaaaaagctcagctctagtaattcatggtggattgtggatgtttatgttacagggcagacaggtgcgtgaagaggtcgctatcccccagaatatctttgcctgattacattttagctggcgaagaacctttacaagaagaatttgtccgatcactccgggaacgcttcccgaatgatcaaaggcctccggatgggcttatatatgagcgaatacggtattatgaaggatatctcgacggccccgtaaacaggatcgcagcaaaccattggtgggctgccctggaaagggttcctggaagcaaaaagggaaaatatctgcgggcttttctcaaacatcctacactaccccaagccttcgatgagctgctccctatagcgggtatctgggagggcatgcgaatcgggctactacacaagttggtgtcaatgcgctgtgatgaggtaagatactgaacccaagccccatgaccgaaaggctaagtggatgtatcagcctctcctatgctaccttaaccacataaaaagcaccttttttggcttaatgggggacaggcgggatcttttggcgcaattagacggcgtgtccatccaattattgaaatcccgtgtgcccaaggtctctgctcgggacttgcggttcttggaagatcgaatgtcaaaggaagaattgttccctgatattgaaggtgttcaagaccgcactgaaatttgggaacgactgaaagagatccagtaccccataccgacactggagacatttttcaaagacaggatcagtctagaggtaggccggagtgtactacagcaactctacattcccgatccccatcggaagatgactgtcgacgaagaactcggggaacgatattatacaagtgtccctgtaatgacttcaaatcgccagcatggaattcggggggatctttatgatttctggcggttcagctttcagtatggattcgaaatgactgatcacaagcgccgcacgcggacaaagcctgggacacaactcgcgccgacacccatggaagaacttcacgaacgacagaaactctggcaacatctcttttggcttgtcagagaaaaaggctttagcacccctcttgtggatggactaccggctcacccggttgaattatcccctattacaccgtgtgactatcccgcaagtgtggaggaagacctaccggtggaaagacgaaatggaacgccatataaggactcaatggaggcagatcattttgcactctcgcgggaggtattggaacggccctggagctccccccgagttactgcaggatttgctcgacgatcggtgtttttggcatatttccgctatctcaaagtcgaaaatggcagtcaatccattcctgaagtcgaaaccaacgaggcagttcctcaggaaccttctttgtggaacccaagctttgatgacctaatacaaaatacgatcattccaccagaagaaaatgaagcaacggtgttccccgtcttttctaccccgcagtttgatcccacctcacttgctccagccggggatattcagccgccgagccgcttcagtatgaagttcatcatccctggtgagcctgacaaagtcgtactgctaccaaatattcaatccgctttgaataaattcttcgaagggttctcaagatatcatttccatatatattctggcgataatccgacacggggtatctacgggagagattgttattcgctgtacttagggaatccgtttctacttttacatgccgaatacataggagcggatctgtctgaaacggtgtttcacgggtcgaccgaccagcaggaaacaaggacgaccaaaaagcgacgtttgaatgagaacgaacaaggtgaacttatttctgccaaagaatggttaaatgcgagcctggatgagttaacacaagaaattcctgaaaatcgagtcgatatggatctccccgggggtgaagatagtataacatgaatatgactgtttcggccttgctcgtgactcctttgtgaattccgttgtggatgggttggtggatcctcgtattggcaggctgcgctttgtctcacgacccttgtccattcgaccttcccaaagcgctcagaagaggcaggggaaggtaggcaggtataaagggtcgttgggagtcctcactgggaccgggaaggaggctgactatctgtttatagttccttctcttctattctgatgcattgcgtctgaatctttctcgcggcatggcaccgatcaatctggacgacgtcatccattatcgtccgcctgctaaaaaaccacatttcaaaccgctccgggcacccggttcccacgatcgtatctattcacagatacctttggatagacccgcgccagctattctatccagccagcactggtgttcgagtcttccattctcggggcatgcgccgtaccttcaaagtcatttccatgcacccagtgaagtcgagacgttattagcccccaacgagcttgcggaagaagtgaccattgacagctcgaatgagtttgacatggatttcttgaatgcctcttcggaaagagatgcaaacgttgctatatcaaatatacacacggcgagtcgagaattgccggatgatgtttccagcagtgatttagggcaaggtttatccgaccagcttcacgatggtacgtggtgaccatcattttgacttcccttgatttcttcaattcactctgttgaactcattgtgccctatctctctttccttaacgataaagtgttcgacaacagagggctgacttcgcactttgagaccagacttccaaggtgacgagcatcatgagagcaacgtgacatcttcttctcaagatattattcaggggggaggtcttgagcaatccacacctttatactctacatcggtccgtgatggcctctgcatcccggtggcggagggaaaaattctaagccgaacagaagcatatgaaaatgcaggtcagtgctctcagtcagctaggttgcccagtcctctggctcacgtggtagaatgcagacgaattcacgatggagggagacattttgcgacattcaaacccgacaatagatatagcagacggcaatacaatggtcaatggccaaattcttgaccctgcgggccaggaaaagcaatccactccaacgcatttgttgtccggagatgcgggaattgaagcagacaaattaggattgaaaccggcagcttgcgtcatcggggaaagcatgccagccgaggagtacaacagacagcccgtttccgaaagccaagtggttattggccaggagaaagacagggctgcagcccatgataacaaaggcgagctacagcatcgtcatgcggagagcctgtcagcatctccaaaacctcgtcaaaatggaacactggcgcgttcaatctcacccgcatttcaaaacagtgagaagcagtcgccatgcagcccaacagtggaagttacaggattctgtccagtgttagatcaggccccagtgttagaccagccgtcggtcgtcatctccaactcccgtccccaaaagcgaggaacgaagaactctgtctcaataacacgaatggcctctccgaacagaaagcgagaccgggatgagtatatatccgatgatagcagcgatgaccctgatggctccgacgatgcggactacgtaggcgaaagcggtgaagacgcacatggaagcaaggttccttcccatcgactaaaaagagcaagacgacctgccatgcagcttaagactagacctccccggcagaacattaaacgcctctcggtcgatgaggcaattccatccaaagtggccgcagatcagacttccctaacaagcttgcacgaaatcgaaacaattcctatccgaggtttccttacgcgacagatacttttgccaagggtcatctattcggttacctttgaagagcaggcagagctacatcacaatatgaaaacaaaattggcagccagcattccaagcaatcccccaaaaaagggtctcgcgctgggaaaatgactaggccaacccgaatcctatctaaggacgaccagcttttgattgaattgaaagaagagcggagcctgccatggaagcgaatcgcagagtattttcctgaaagatcggaaggctccctccaagtgcgctattgcacacgcctcaagggccgcaaggccggaaattctactgggcggtgttccaacgcgagaagcgattcttcatacagaggcggaccttgcgaggcagttcaagccgcaggtggcaagagcaagggcaccgaagaagatgtgtcaagaccgcgatacggtccacctcggcgcaggcaaacggtggaccgctattccccggtttgagttggcaatagttattagtctttgtcgaatatcagggcgtactatatatgctgctgctgcgacaatcggacgttccgattgttgttatgatctttttgcgcaatggttgaatcatcttatgtaattataacaaacgagatttttatattccctgctcaagtttggcagtcgtcagttattaaactcaccatttctagtttggtatcactaccacagactaggcgttgtcgtcggtttgtcaacaatctcagatcattcatcgacgaagtaacgtgaaacagttagcgtctctgtttccaaaccccagagtaatactagtccaaaaatggaataccctgccagtaagagcttgttctcatcagatcaaaagagattcgaattacatgtatttacccgttcgcccataaaagcatgtgcctcaatatagtacggatggacgaatggttcgaagttggatcccaggttacgtaatgtatatatgtctgtatgagtggctccctgttaggttgccattccgctaggcagaagggagatgagttgctgcggctataattagctggatcttttcccaagactggatataattatcactcttgtacctgaatccaagtttccaacttcgacgaggggccagggtaaatgaaatcacccatccatccatactgtatccccaccaacacaatccgcttaaccccaactccagccccaactcagcaaatcaaacccatcaagacatcgttacaacccaaagcagtgtctcatgtatcggttttgaaataaaaactaaataagagacagaatagaaaggcgagtgaaatactgtaaaggcaatcctcaatacttctttctccccttccccttccctttccccctgatgttcaactccgcaaaccccaactcctttaacctctccgcgagaaccgacgaatcccgcatccccggaaaatccttcgccggataaacacgaaacagatccgaccacgcctctgcaagaataggcatagactgacccgtatcctcaaccgatccccaattcattagtctgaattgaagccggtacgttccagccgatcgaattgaaagatcagtgaagatgaagaatgtggccggttgatggagcttcgacgcttggtggttgttgtcggggtccagagccaatgaagggctttgtgtgtgggaggaggggtgtgtaggggcggaaatggggtctggatctacgtcgacgtagaatggggacatgaagactttgcctaagaggggtgttggcaagacctcgtctgcgcgggttacgctatctctttctttttctctttctgggccttgcttgtcctgggaatgcagctcattgaatgagtctgatacgaggaataataagcagccaactgtgaagcgtgggtcttgtagaatgtcacggtcatcttttgattggtggccgaagtctgagaggaggatttggactattgggggtggatcgacagggcggcgattccagtcgctcgcgccgcatgctcgtgaggcgaggggctgttggcggacatggaggtgatagcgggatagtgtgggttttcttcggggtggtggaggggatgatgattcgggctcgtgatggaggagttgttcgaagccatggggcatgctatactttgtatttcggggccttgttgcctgcgcgctagctagcgctagtgctggagactgagcttctataaacgcacactggcttttctgagtaagcctggcccagtatagctgttgagctgctgctatggctgtatactcttgcgtgtcagtacaagttcctgtggtggaagaactcgtgcaaaggctcttcacattttcaacatggaagaatcgcttgaagtcggcaggcatgtacgggtatggttggctagcagatagagacggctcaatcgaaaataataacgaaaaggaaaggactttaccgggatttcaggtcgtgtgtctgcacccgaggactatattcgctgccgtggctcatcgcgggattcaatttttcctcatatggagcagagaaacacccacaccgctcacaatgatgcatttgcagtggcaattcacgcggcatatgtggatggttcatgtaggcattctcttgcaaggccatatgcctagcgtcgcttctctctggaagatgccctattgacggcgaccggggaccaggtggccctgccaatattgggcggtcatagaggatatgcggagataaaaagtgtcgaggctcgtgtcgcggatacatatgatatttcaaaggcatctggccggggtggtgtgggtgagagaccgggccgatataagatttgccgggtgtgggatgcccacattgcgacgacgggggtcctcggcatatatacaggacagataagactggtgcaggtgtacaacagtttgcgcttataatcaaagcaattcgcgcgggattcagcttgtaggtgttgaagacacccgcgggagtaatcgatgtctcaaaaatacaagtcttctttttaaatcatgtcaaagtgcaggtgactgcagggaatcgtgtagaaaagaaagatatatatcttggatctgcttggcgccaagtgaaggcaactaagatacatatactggatctgcttgccgccaagtgaaggcgactaatgaaccgctgcagggtgcagcccatcaacaacgtggcggtatgggacccatatgtaggggcactggataacccgttgggggtggggcaatgagcgcgacacaagttttagtgtcgcgctcttacttttcgcccttttcagtgtattcgcacgccctccttaaggagacaatgagaattgccttgatcaccaaatggcagaataggccactgatctgaggttcggcctataagtagcgacatgtttactagcctgtcaggttagtaagccagcgcggtcgccagttaatggacaaatgaccggtgctcacaatcgctagatctcagcctctgtctcttatttcggtcttcccagaccactccgtccactctccccatattacgagtttgtttaatgggaagatgcgtagcccgaagtactggctagcttattcgatgcggatggatgacatgttgcgtgtgtgctagaagcacgaaagtttcgttaccatgtattatgtaaccgactgattctggtaaacgcaccaaatcctctggtgataggatgtttcagataatctcgaccctaacgatggagcatatccatattacccgaccttcttcagaagacattctagtcaaccgactgtattcctggctaatacaattcatgccaatcactcgctcatcgtaaggggaaagacatattggaacctccccgccttcaagtattttcatgataccacccttgcctctctgggctatgtctcgtgacgtgagaccattatggaccattacagatacatctgctccgccatcaagtaaagctttggttgctgccatgtactcgagctcgactgcataatgtagcgggcttcggctctgatcatatcaaattatagtcgtgtcctccctggccgaccaagtagatacgatgcgcaaagggtttcagcgccagtcccacaacgaacactcaagtggcagcgctaaaatagaagaacacatttccctcctgcctcatgctctgacggtgcaaacatcaaccaggtcgactaacgcagtggtccatgggtctgtggaccttcatgtgcacacagcagtcgatctggacaggaggctttgcctgtttttccccgtcccgattcgatgaccacgccgcgtgttaccggatattggtgctagagttcgaggacgcttcagccacctcacgtcctccaagtcaatgacaaccaaacggccacccatgtcatcccatagcatattacgccattcgccatcgctatggacaactccgtgcgatcggagcacgatcagggctttgtcgcgctcttcgtgaaagaagctagaattctcatggttgatgacatgctgaagccgcgttccagaccagctcaggatcatcatctgggtcattaattcaccatggtaccaatacgagacccgtggctgaaagtctccaagacagacggggatctgatgtccttgtaagctcctgaggtgacgataattgttcacctcagcttgaaggcgatgctgcttctccactgtggtagctttaatgatcacagtgtatccatgtgatagaagggtagctttcacgaggtagcctgtccgaccacagacgtgcaactgttcgaacccaaggtctcgatctcgggtaagctgacgatgaagctggcgtgtgaactcctgaggtcccatggagtgtctctgaccaccgtggtgtttccagttggggcattttttatccaggggttctcggttgaccatgccgcggatgcaggcgatggtgcagtatggtcgtgtagaatgcccgtctttccgagaagtctgtttgttgtcacggtcgactcgtgtcctttcgcttcccctagttgattgacggttgttgcctaggccgcggctcgatcggctgcgcgatgctgctgcggcagacggtgaatgcgattcttgatcactgccgctgctttcagtcgacgagtgcttcggtgtagatgcgcctggttgacaacgagcgcgagcgcgagagcgtgtgttgtgtattttctgatctcgtttccagcgtgagggccgataattagaggcccgcgggtctttacggagggtttcggggatttctctcaacacgtcgagatattcgacctcccaggtcgttagcttatcgtgtgccgcatcgtgccattcttgagtcggaggttcgacggctagcgcttgaagggtgaacgcaagcacctgcccgatggcggtccggtggaggcgcaattcatcgtctgcctgcacgtcttgatttgggatacacaagaaatattgaacaattgtgggatcatctttcgggatatggaggaaaacaaaggcctcccctgtgcagatgtagccgtaccgaactccactgtcgatcatgtacgagaatatctgagtgaccacagcggcgacgaggcgggtggcataaaattcgaatgtgtcgccctcctggtcaatgacatcgctagccagatccatctggtgtagacccaccaccaattcggcgactgttaccttgtgcggcgctttaaactccactgcatacactggtatttgtcgttcatcagccgtaaggtgcacgcagaactggtcggcgcgccgattgcgtcttcgtgtagtaccatccctcttctgtctctccgccgctcctccccctcttcctctgcctcttccatgcctagtgttcgccggtcgttggggtgtccgcgcgtcctgaagattcatctgttccaggctgttctccagcgaagtttctgatgggtttgcgcgatcatagaaggtgacccgaccttggattctaaattcctgtcgaagaggttcatcgtctcccaaagccttaatgaccttttcgacaaagttatccaccgtgtctcgctcaaaattccgaagagacgcttccgaatagatcggcctgttctggatattcgtaacgacataatcgatttgggtatcagaagggaatagtgggcgcgaggtaaagccagcggtgcggtcgaatttcccccaaacttgttcttgtagctggggaaagtcaagccaagggacaatgtgcttggggtagagtcggttcactggatcggtcgcgtcgccctgagtcgtgagggtcgcatctgcctcaacttggatcgcttgggacagaaaattgtggcagcgatcgaggaggcgagatagtgtgttgggttgcactcgccgctctgccgcttcccgtgctagtctctcttcctcctcgcggcgctctgcctcttcccgtgcttgcctctcgatttctcgcgcctgtctctcttcctcttcacggcgctcagccgcttcacggagcctttgttgttcttcaacctgacgtcgtaattcggcgattgtctcctccatccctggttgaaaaaattattcagcagataatccaactaaacaaattgaagtcaacagagtaggggccccagctggcgcggggaatggaatgtcacgggagatgggcgtctgcttgtttacccgcttactcacccgttagctcagagtcaattagtgcctcaggcattaaaacacgttgaactttcggttggtttcaggcattgtctccaaaacatgcccgactcgatggtatctagatttgcctcgtcagtacataggtaaattcggtcctccttccaatcctcaaagtacagtcaccgtagcgagacgactatttcaattgcatcactcgcgaggcccacttccgtcctccaataaaggccatttgcttcgaaggatagctgcgttgtatgatctcgctgtgaggaatgcacaatgaagctagtagccagcaaaagctcttctaaatagagaataggcttaccttctttcgttgtccgtctgttctgcctaacacgctactgtatgctctaggctttgggggttagacatcatgcagtcattatccaacggacctcatcgacaagtaaagacgtacctgccatattccttgtcaggaacaggcttgcttgcttaatgctgatggtccttgattgagccatcaggccctgaatacacatcggccatttcgggggtgattagctcttatatattgcataagatgcctagtggaggcgaggtcttactatccagaactgcgaactccaaaccgcgaactccaaaccgagaaacttcaaactgccgacactcccactcctgcttaactctctaggctagccggcgacccaataccgtagttggcagcgctatgaaggttgcgtatggctggcgactcggccaagaaacccattttcaggccatttttggaatgagtcagcggcttgccttccattccagctcgcctgatctcgattaaaggcaagaccgcgggaccactaatgacgcagtgacccctctacggttcagacccgcatccagccgatgattggtttacaggaagatgactaaacatgctgttgtgacgtaactgtaaatatttccccagagagtgtacgaagtacgtaagtggaaaattgcaactaaattgctattcagaaccgcgaactgcaaactgcgaacaagccctttgaggagcaagcaaccgttgccatactgcgagtccagccaagcacagcccgagcgtagagcgacagtctgtggagcgttccccgcaattttaagggacttagagcccctatgaatagagacccattggcctagaggtttaacaacggaaccaaaggacgtcccaggacttcgttatggcattattgtaaaattggaaacggacaactccatgtttattgggtccagaaggctgactaaatataatggaacaatctagaacattgtaaatttggaaaatctgtgtggttttaatatgtacaactggggtgtcaatacttcagtggtagtaaaataagagaagtgaaaaaaaaaccccgtcatcagactggttccattggtattaaatctatcgtattaaaacaagagaaaaatccaaatttggccctcagggaccgccggctctgggatcccatcccacttgcagttcctgggttctgggcggttccggggaacgtggttggtgttcctggtagcccctgtcagagatcgagcatatatagtagcttgggtgtttggtcgctgaccaaacattgtgcctttttggccagatggcgtagtggtaaaacccaagcacccatgaaccgtcacagtttcttgaggtgtgttctgggatcacttgatccgtgcctaggagcgcgtctggcgttcctgggctgtggttggttccggggaactcgatcggcgtttccgggaaccccacatcttgttcctgtgtgcagctcgagtatcttgcatatatgttgaacctgtctaaaaaagtgtcatgtagaacgaaaaagatctggtatcgatgcgagataggtaatcagaaagatagagatgccaagcagttgcaagcaaatgaagattaactatatcagtttgttcaacaatgtgactaggctaaaacttcttcttgacctagaacatggatgcctattggttttgttcgcgagttcggatccgacagacggctttgcttcgatttccagtgaccacatcattttctttttgagttggtcctgttggaacccggatttccacttgcgtttgagaagtaatgatcgaatttaacacaaagtgattgaagtcagtgatttgcagcttagattgaagcgctcacattagcgatacagacagagccttcagctaaccccgaaatctagcactaactgtcatcgggagcacacgaccaagttccgccttaataatgacaccaacagaactgtcgatcccactccagatatctctaagacttgggactttgggctgtttatgtgcaagccttcaattcttgttgtattacgaggctggtgcagatcaggaagcaagtcgcaccattagaattaatcccgtgtttacgaaaatgataattaacttgatgttctcattacatacagcctcgtgtttctcctgaaataccaatcaattttttgaattacaacatttatgaagctaatgtcagtggaagagatctgggttatgaagatacgaaacgaaacgagggtacagcatggatcgaaatcagattcaccagctacacgcagagattctttctccctcttttgaaacgtcgctatacctattacggttaatctacccccgaaccccattcttggcagtattccagtacgtgtgtaaatgacagcgtaaaaataacatccgtaatgagcttgtatggtttcaacggcctctagaacgttgatcctgcaaaacaaagcaacaaaagggaaatccgctttgtcggtggttatttggccagaattcaaattcgcttcccctcaatatctcatcctccacagctccacacgagtcctctatttgcaaagccagagatgttgaagaagttttaaaatgtggattctgatcaagaacctctttattgacagccctacgcaagctaaatttcctgcgactccggggtggctccagtccaagtcatgaattgcccattagaaatggaaccttacaaaatctggatcaatcaatcatggtgtcagaggataaccaggtggtctaagtctattcctaggtgtcgattcaccagcaattgaaggatgaaggatattgcgtagatagccctggaggtatatattcctgctttctcatatgtaacatcattttaaatgttgagcaatcacttagcaaatgccactaatccccagccgacttataaaccgtctgcatgatttccaaccttggaaaccctgcccaatagaggctcttttacccaagtgattgcaatccatggatactgtatcactttacggatcagtatctcctctgaacaagatccactatacgaccaccacagtgtctattcgaataactttcctggaccggttgcccaagctttgccaatagtttccgcagtgccgcgcgatcctcatcgtcacattctggtgacggtctccacgcattctcaaggtctgcgagttctttgggatcctcaccttccatataaggcgaagggccatatccatcatagcagcacatgtaccgattgtaatacagcccgaccttgatatccctctcctgctcaaatggaatatccgggtaccagttactactgccgattcggaagtgtcgcagttttggtagtttctctgcaaatagatcgaaaatatggtgccatcgcttctcgaacgaaccatacaaagactcactgccctcgcggcgcagcaaggcatccgtaggtagagcacaggcgtctacattctctttcatcatacaaaagtcgtagaggacggcgcagtcatcgaagtagatttcctcgagggtgtcgccatgcttcagaatccagtcgatttggccatcatggaagaaacagaagtttcctagtgatagcgtcttcaggcgtggaaagaacagattggatagatccaggtgagggtaaaagcccgagtattcacgcgagcagagcgagagatgttggagagaaggcgcagcgggactcagccatgtcctaggcaactccttgaaaaacttgcggatttccggatactgatatgtttagaaaaagcatctcgatggaggatggggtgggttatacctcgagatcatgctcaggagcggcgtcatttgtctcgctggtaatgcttaggcgaagggacagtaggcccgacaggaccttttccattttcgcaagtgttttcggatctttggggttatccgcttgcaggttgcgaataccaagatcttggattgggtgccgtaaggattcgagaagagagaagagcttatgcattgcgtggaatcgaaattgaggcgtctgggggaagtccgtataatggaggtaatcccgatccctgctgtctgaagtaaaccccttatcgaagcacagaacggcggcgttcagccgaggcaattctttcacttgcggaacaagattgtcccagccttgcggccatttttgctcttctccatcatcatagtcctgtgcgcattagttgttgcttggagctggataaagatcatcgtacaagactctcgtccacggtgtctatgtagatctttcgcggagtccaatgtagactgggattgttcaaaatttcttgtaacccattttggcttgtctcgctgggctgcaggtgcacggtcctgaagggctgatcggtggccagctgtgatgtgaaacggcaggattggcgcagcgactttaatgatgaaagatccacattaaaaaatgtgcgagcgagccgttcgctgggaaaattgagaaggcgtgacatctgggcgtagtcgcaggtagaattcccaaattgatgagtcgaaaggggacatgtttcgcttagccctaggctcctatcgtggcgtccaaacttcccaattcggtaaagcctcaataaatcacatgactaaaaagtagactgcggtaggtgatctgattagagacagaagaaattacctgccttgatcttataccccgtatttgccttgagggacgatgtatattttcgtttacactgctcatgagttaaacacgtgaacttaagcgctatcatatgtaaagctgccacggaatactaaatctctgaccgaagtgaacctcacagttaaccgtagcgtaacgattgtatctatgtttaggaaagttacagccccgccatccgcgtaatatatggtgacagaacatttcaagatctcaaaacagactaaagcatagggggtctagtgtgtttcagaataaagttcagaaaagaaagcaaacaaatcaaaggtgaagctgatttcgagcggccctgtacgacgaacacgaaaagtcaccgccacgattattgagaccgagacgcaccaccagaccgcgtaacaactatggccaagagcaagaaatcgaaatccagcagagaaatgcgcgctctcagcagaagaagagaacccggggcaagccagtagcccaacgtgaagcggtgacttcggacgacgcgtcgactgagagcgacgacacgaacgccgccaatcttgtgaaagagctcgtgaaactgaggagagacatcaaacggcgagatgattcgcacagagaggagatgcagaaagtgcaagaagaattgcagaaagtcaaggaagaatttagcgccgcccttgcagaggttcaacaggagctgcagaccttggcagagagaccccttcccgaaccatgcgcgcggaacggccacgatgagatccttcgcgaagtccaatccttacgcgaagaaatcagcacccccgcccccgcaagctccccgtcctatgcagatgtcgcccgtacccccccactcagtcacccgagcaacatacggactctctcaacgtcgaacacaacaccaaccactttcaccgacacgctgtactgcacgatagacacctcgaagatgaccgaaagcgaaagtgagaaggcatccgcgggttcaatcagggccacaatcgagacagagatccggaagatggatgatcacactcactggcgctgccgcgcggtcactgtaagcccaagagataccaaccggatcagaatcgcgtgtcgcgatgaagccgaacaccagctagtgaagaaagtggcggaagcaaagatcggtgcgggagcccgggtgcttcgggacgagctctacccgattaaggtcgacagcgtcaagaggaccgcagtactggatgagaaccatgaaattctgacaggagcggcggcagccatgggtgaggagaacggaactactgtcgccaaaatgacgtggttgagcaacaaggaaatcgcaaagccctatggatcgatggtcgtgtacctaaccaaagggactgatgcacggaggatcctggccgatggatacttccatgtcggaggagaatccgggacaaccagcgtttttgagtaccgaccacgaccggtgcaatgctacaactgccaggaggttggtcacaaggcattccaatgcaagaagatccagaagtgcgcaaaatgcgcgacggagggccatcaccacagtcgctgtgatcacacggttccgaagtgcgttccatgcggtggaccacacgaatcgtatagcaagaactgccagaaactctacccgtcacgtcatgaataggtcactccggataatccagctgaatgtgaggaaacagggagcagtgcatgaaagcctaatgaacgacgaagatactcaaaacgcagtggcgttggcgatccaggaaccccaggcgaggaggattcaaggccggctcttgaccaccccgatgggacatcacaaatggaccaagatggtgccctccacctggagggaagggagatgggcaatccgaagcatgctttgggtcaatagggatgtggaagcggagcaagtgcggatcgagtcgccagatctgacagcggccgtgattcgacttcccgaacgacttgtctttatagcatcagtttacgtggaaggaggggaggcgtctgcgttgagcgacgcatgcgatcgcctgagaaaggccatcacaaaggtacagcgagatacagggacagtggtggagatcatgatcacgggtgattttaaccgccatgatcaactttggggaggggacgatgtgtccttgagtaggcaagacgaagcggatccgattattgacctcatgaacgaatttgcactcagcagcctgctcaagcgaggcaccatgacatggcacggcggaggacacagtggggactgcgagtcgaccatcgaccttgtcttggcctcggaaaacttgacggactccatgactaagtgtgcaatacttgggaccgaccacggctcggaccacgacgccattgagactgtatttgacgccccgtggccggtcccaaagtatcaggaacggcttctactgaagaacgcgccatggaacgagattaatgctagaatcgcgagcaccctggccgccactccgtcggaaggcacagtacagcagaaaaccgatcgactgatgtctgcggtctcggacgcggtgcacaatttaactccgagagcgaagccgtcgccacacgcgaagcggtggtggacaactgacctgacacaactgcgtcatatatatacatactggcgaaatcacgctcgttcggagcgacgggcggggcgaaaagtacctcggttcgaaaggatggcccaggacgcggcgaaacaataccatgatgccatccgtaaacaaaagaagaagcactggaatgagtttctcgcagacaacgacaacatatggaaagcagcgaagtatctgaagtccggggaggatgcggcatttgggaaattaccgcagctcgtcagagcagatgggactaccaccgctgaccatatggagcaagcagaggagttgctttccaaattcttcccacccctgccggacaacattgacgatgaagggatcagaccacaaagagagccagtggagatgccggccatcaccctggaggaggtagaacgacagcttcttgcagcgaaatcgtggaaggcgccgggagaggacggcctgccggcgatagtttggaagatgacgtggcccacggtcaagtaccgggtccttgaactattccaggcgtcgctggcagaaggctcgttgccaagacagtggagacacgcgaagatcataccgctcaaaaaaccgaataaagaaaattacaccattgcaaaatcatggagaccgatctcactcctagcgacactgggcaagatactggaatcagtagttgcagaaaggttctcacacgcggtggaaacccacggcttgctcccgaccagccactttggagcccggaaacagcggtccgcagagcaagcactcttgctcttgcaagaacagatctacacggcgtggcggggccgacgggtattgagcctgatcagcttcgatgtcaaaggagcctacaacggagtgtgcaaagaaagattgctccaaaggatgaaagcacgaggcataccggagggtctgctccggtgggttgaggcgttctgctcggaacggacggcgaacatccagatcaatgggcaattgtcggaggttcaaagcctgccacaggctgggctaccgcagggctcgcccctgtccccgatcctgtttctcttcttcaacgcagacctcgtgcaaagacagatcgacagccagggaggagcagtcgcttttgtggatgacttcaccgcatgggtgaccgggtcaaccgcgcagagtaaccgggaaggaattgaagcaatcatcagagaagcgctcgactgggaaaggagaagcggagcgacctttgaagctgagaagacagctatcatacactttgctcccaagacgcgtaaatcggaccacgatccgtttaccatcaagggacagacggttgtaccccaagaccacgtcaagatcctgggcttattgatggacacgagactcaagtataaggaacatattgcaagggccgcttccaggggcctggaagcagcgatggagcttcggcgacttcggggcctaaccccagcatcagcgcggcagctattcacctcgacggtggcgccggtcgtggactacgcctccaatgtctggatgcacgcgtgcaaggataaagccatgggaccgatcaaccgagtccaaagagtaggcgcgcaagccattgtggggacatttctcacagtcgcgactagtgtcgcagaggcggaggctcacatggctactgcacaacgtcgattttggaaacgagccgtgaaaatgtggacagacatccacaccttgccggaaaccaatcctcttcgccggtgtacagatcagatcagaaagttcagaagataccaccgctcaccactgtatcacgtagccgatacgctcaagcacatcgacatggagacattagaaacgatcaaccccttcacgctatccccgtgggcggaacgcgtacaaaccgacattgatgagcagcatgagtccctggccgaagcgggcgggtgcatgcaggtcgcggttagcagctctgcacgaaacgagctggtgggttttggagtggccatcgagaagcgaccacctcggaatcggaagcttaaacacaaagcgctatccatcaccttggctgtaagggcagagcagaatccattctctgcggaactggcagccatggcacatgtattgagcacggcgacgggactgaaagactacacgatcgcactgctcacaagcaacaaagcggcactgaacatggtagttggagtgaaagattaccggattgcgctgctcacgagcaacaaagcggcggctctgacactaaggaatcctcgacaacaatcaggtcaggaattcgtctaccaactgtacaagttgatgagaaaactgaggagaaatggcaaccagatcaatgtccggtggatctcaacgagtgaagacaataaactgcggagtctggccaaggaacaggccagagccgcgacacaagaagatgctgtgctgcagaagcaggccccaaggatgaagtcaacaacactcaatattgcatggtcccaagcagtccccaacaatgacctgccagcgaatatagggagacacgcaaaacgagttgatgcagcactcccaggcaaacacacccggcaactgtatgaccgattatcttggaaagaagcgagcgtgctagctcaactccgaaccggcatggcaagactcaatggatatctctatcgaatcaacgtagcagacacggaccaatgtgcgtgtggacaagcgagagagaccgtggagcacttcctatttcgatgtcaaaaatggacggcgcactggacggaactactacaatgtaccaacactcaccgagaaatatatccttctttctaggaggaaagtcgccttccgatgatcagaagtggacgccaaacttagaggcggtacgggcctgtacagttattggaattctttaagagtttatcaagttgaaatgatatgaggtttgataatggactgcaatatggtatgttatagctaaaagagagcctcgcgatccgactggttctgacagcctagtagtcttttagacacctatgatgtgtacttggtggatacatgggaaagtactgtgatgtcagagcaaagtaaactccttattgtttcctgttccttccacttatacaaatagttgcattctctcgcttcacttcttactatttgtgattcttctcaacaaaaaccaactagtcttcgcctagatcacccgagatttgtatcctcctaggtcgtctgcccagcaatttttgtcatgcttgtgatcttgaaatccatttattgaccaaataagctcccatcttcaaccactccgcgttttcttcaatcatcagtttttctttaagttccccaggaataaaattcagtaagatgggcagggttcgaataatctgtttgtattttgggtgcacaattgctatctcatgtagcaaggcttctccgtcgctaaatagatcactgcgatctctgaagtgatttttaaggaggggcaactgtgctttgcaaagcttcccagtcatctttagggcgccgcggcaagtgattggacccagtttcattgccttagacaatgttctgtttttgaatgaggctgataaaatacattggctggctttggagccgtgctgaccaagtgaagactttcgcactctgtttcgcctgcgggaattctcggtgtctttctcactagtgcgatgtagtgtggattcattctctcttttagaatgaacggcccgcttggtctgccactgggggaatgttgttcctaggttattttgttttgacaagcctctggcatccagggaaacctctggaatgccgacactgcttgcctctttgggcagttcaagtgaagtagttagagataattcaattggcgcgacagaagacagaaacacagaatgatcttcattatcttttttccttggtgtaacagaatccattgggttttgctttggggctcgaaacggtatgatgggcttccaggggaaagtttggaggagaactactaaagagagcgaatggatattcggcctttatagcttttggaaaggagatgggatctgcgtcattccaaatattagatgaaacttaaatatgagttgacaagaaagtaataccgattgagggatctgggtaagtcctatgtcgaatgatctccaagattgagaacgataaacgatgcaatagtacctcacttttcgcccggtaatattgtgatgtacgatgggcgtttgccactcttttagcggttgaccagaaaatgaacgttgcgatcaccgctagccctccctgaggtatgccgtgcttaatcgtataaaggtaattctgagggatcaatagttggcagtaattgtcttgtggtttcatcatattgcataatatcgatatatcagggaccgctaatagttcacccagacagagtttgttggtagaactatactctgaagggatctttatacagtggtagtagtagtagtattcatttacactgacccctcgcaaagcgatatgcagtatacgacggctatatatccgggtatgtacatatagattgatccactttctgacatgaacttagagcctcgtcacggcctatcgtggccaattgccgtttccattgttaggctgccctcatggcgcggctatagtggaattgcggatgagacggatacgaagtatccgattttggctgcatctctgttaggaaccgcgagaacgcgggcaaagcagaggctaagaatctggacagtgactgagttacagatgcggttttgttccgagttcgtttgattgagcgttggcttgccttattatcgagctggaacggtgacggtttattgtgaaaacgaagatgaagatcttcaattgtgagtatggggttggcgggaaggaaagggtcttgcactggaggagtcggtcgcggtatggatgtgacaggtcgctggaggacggaagcataggttgtttgttggttttgggacgaggaagtgatggacggtatcgtttgatgaggctggggagagtgggctgttggaggttgttgcggctctgggtctattatggcgggtagcggatgggaacggcagtccagattggtgttcaaccgttccttcgctgtagtagatggaatgggcgtggattgagtttgagactttgtactggagtcatctgtagtttgcgtactggactcggcggtaggagttgaccgtttaggggaggagaatgcggtggttgaggaggggggtttgttgggagttccgaggtggtgtttcaaatcgcacgagattatctgccatatgcagtcttcctcgtgtagttgttgcacttcctcgaacggggtgcattggaaggtggataaatgcttggtcgattggcaggcaaaacaacatgccacattgctgactcctgaaggtcggtaatagaagccattctgggccagttggagcggagtggccccagcaagcactattccttggaacgaacgagctcgggctgtgatggtggagtagtcgtaggtgattgagacgagaaagtaatcctcatcgtgagaatcatcctcgacgtgagaatcgtcctcatcatgagaatcatcctcggcgagagaaaagtcctcaacgttggggtattcgggtgagattgtggggtttgcggcttcgggggtgggagatggctggcttctcgtggtcatccccatggtccggtctctctatctctcgagtatgtccttggaatacagtacttctcgaaactgtatagggtacagtgtatagggtaccgctgcgatacagtacttcccgaaactggtgtcaccacttgcactcttcgattgtttctcaaaccctaactgccaagacagactagtctatattgggagttattccggagtatccttgttagtgggccgtgtattgtttcttacatagagtaatctggatatttagccgctgtattaatctgtaagtcgacctaattggcaccacttcggaagccttcgttccttcggcgagaaaaaggtcctcaacgttggggtattcgggtgagattgcggggtttgcggcttcggggatgggagatgggcgacgggctggggggtctggaagctgagggttcagccccacccgctggcttctcgtcgtcatttccatggtccggtcctaatggtacagtccctaacctctttatacagtggcggccgttaccgccttccatgttagaacagagaattggtcttacaaaccctagtcatgggataccctaaacctaatatgatttagtgtaaacagccgattttgtaccttctaggtggcaatacaaaggtttttgtttgaccacaaagattgtatttgtgaggtctagaggccctgattttgaagctgccaatctgctttggctatagattatatgctttcaacatggcctttaggtcatgcagcaaatgttgagagtggagatattattggctaattgacataacccttaagaaaagttttgtagtgagttgttagactagaatgcccctgctctagatttgttagtcgttttcttatacggtccgccgcatagagctggtttcaacccattggcaagctcttacaggatcaatcgtggaacgacccaccgcaaagccccgtctggacgtataaatagctgctctatgcctatgtcaactttcgtccacagctctatatactggtgcccctgacatgaatactatcatgatgcggttgggatttctctcgtcactttttctgaatgttgtcatcgcccgagctggactctccccagtgcggacggtctgtgaatttgattggagcctctgccaagccagtaataacggcgaaatgacctgtttctgtgatagcgacaaacagaaccagagcactatcgacttgaatgactgctttgttaaccttgatggagatctgagcccacgccaaaagtatgcaaaggcctatccgtatactatatatctggttatatttctgatgatatactaaatccatacagtggtggattcatggattcatgtggtggaataagtttcatgcccgcgcttccaaccttgcgggcaacctgtaaaccaaacaatcaaatcacgtctatcaatatgggtatgtttctctctacttaagctatcatcgttagcgtaaatgtcataaaggaactgaccataagccaaaatccaaacagacggggttttcactttcaagggtaataagttaacttgttccggctaggaatggaataaactagcaatttgttacagggccagacttgaagctatagggtccagctataaggcccatatgtttgatggatgtctgcctttattaaattaacggcggcctatatcgccttctatatcgggaatttagagagtttttcggaccattactacactaaccgctgagacagatataaatagcgcgtggtattttcgtctcgtagcctactcagtaataaataccagaaacttatctaccgattggcatggaatatataagaaccaaagttagacctgggtgatggagtgattacaatggacctgtgtttgtactgtgggattcactcttgaaacggatccataaatacataatcaactatatatggcttaccatatcatgtgattagggtttgaaagagctcctttatattgtttggcatggaaggcggtaacggttggcactgtatagaatgtaacataacgaagaacatataaagcaaggacgagcataactctggtcttctacaaccgcaaagcaaaaatatgattcgcttcatccacgtaacaggtaggcagcatggagttaccgcgaacactgtacctcaccaaggccaacttctagagtagaccatgaagcgagcgggcattttcagagagtgctcagtgtcacgggatttattatcaggatgttcgctaccggtcccatccgccctggtttcgaaaggaacttgtttatatgtgagcaggaagcaaggaactaacctttcaatgaggtgtaatataacgcctacagtaggttggttggttggttgatgctatttaccctgaaccctcgcacacgaaagttgaaaccctgggttgaaatacaagtgcgataattgatctatattgaaagatccagccacttgtagttgcctcatccccctgctgcctagcggagtggctgcctaacaggtagatctatacagatctatatacatcacatgaactgagatccaaatttacatagcgaggagtcaggataaatgaaatccatccatccgtctgtaactaggttttctttgtagataactagggccttagtacaacacgcctaggaaagactttattgcttatcacctgggatgagatacagagtctcgaaagatcggtatttcgagaactacaatcgcaagctgaatcataatttctgtaagtttttatcatattccattgtccagccattgtttgcttgctgttgcccagaacgcaagactaagagaggcgaatacactcccttctatttcactgataactcgccccagtcttgaatcatgaatcggcagaaaatcgtgatatttccaaaatttccgacatgtctgggcatgtggcagcagggttgtctgctttaggttgggtaactgatcctgtgcctctactggacgtactaattcgccgaaagtaaaatcggtgtaaataaaagatgattgcaaatagcaaactagcaccggaaatgctccccaaaattacagccacaccatggcttgacaagacccgggatgcgtcagaaccgtccgtcctcaattgttctactgtatttttcgtggcggtcgtggtcgccggcacggttttggttgaatccatgggctggcttttggtgatcggattgagcgtgctcaagtctaagtcgtcgaatttgggggggtttcgtgttgtttgcgtaggctgatgatgacgagaatttccaaacaaatgtgaagaatatcccagattcccggtcacataactaccgatttccttttgtttcgaccgagacacagcacctaaagttcccggaagtgtaactctattggagaaacccactgaagtttggccagaaaggctttggaagtctcctgttgaagatgaagacttcattgaagtaacttcagccggctggtgcaaagtggcttggtctgagggaacataaacgacaaattcagagcttcctgtaaaatcatggtcggaaccaactgaggacactgtatattgtgataatctcgcgccgccgttggctgctttcgcgaactcatcttcacctaaactgaaaggcagtaacgtgcgagagctctgctcttcaactattagtccgctgccccctagctcatcgtcaaccttgaaatattcgattataccgttttccttttcactggtagtggtgtgagtgccaggatatgtgagggtaggagtgtctatgtctgtctccggtggaagtgatcgaagcggcgaggtccaactttgggttgggctcgaagggtatagcgtaatcgattgcagaaagcttgtagcttttggagccttaacatcagacgttgtgacagtattagacaaagttcgctgtgattggctataaaaagatctcagcaaccatgctctttcaaatctagccaaacagaccatgatagaccaacgcttttggtataaaatcctggggttctgaacccagcattgctttctagcatttcttgggtgatagccttatgctaacgagtttggacattccaggacaaattgtggtagttgaaaagtcagcctttgctaggaagaaacgcagactaaataagcctattgtggtatccgcatttttcgaaccgtatggggtcgatgaatagttctgccgggcttttagtgttacactgccaaagggtacactgccatttgttcggaaactgaatccgtgtctgccattcaataaaactatgtagtttgtgggcgcccgaatcaagaacactattcagtaaggcctaacatagcgggtgacgtgacccctcaaattacaccttgtactaaccaccccgtcatttagccttcgcccttataaatgtattcggtgcaggtggattcatcgaaaatttggggcaggacaaccactgaagcctttacattaatgtcaaataatccacacgagtgaaaatcaactacacttggttctagatgcagccccaatccattagtgctcaaatctctgcctatctggcgcatttgatctagtatatgcaaatctatcttcatattacttgaagtacgctgaaaacttaatgaatcgccattttccgggttttcataaggcccaaagtatataaaaggtggggcactgctttgacatggcttgtcgatatctaagtttattcaagcccttatttctcggcggatggttctcgtgagagttgatgccctcaaagcatgctacaaactatcgctatctaggcgtaggctcaaagcaaagaggaaatcccgctgcttaattgagggtgttactttctgatgggttgtatctcgcttttctgtttgaaaatattagttggactcgtttgggggatatctaccggaatagcagatctcgttgaatattgaggaccacgaactgataaagccctctggtatcgttgtacgtatcccgaaatcactgcagcgggtattttacctcgtcagctacaagtatagccctagaagaaatgtcgattctggaatttggatacgccttttgttctcataccataaagcaaagcgctcatgctgcctttcctgaaaccagtcatttggttcatcttcgtggtcattttttctctggttagtggcttttgttaagctactgggactgatggataacctaattactctagacattcggtcttgtaattcgctctgctgagtataaaagaagtgtcagtgactctgaggatattgcgagccggggcgcttgggctaatagaaatgaagccaccttcgttaggcacttctcatagtcggtcccagagatgggagctctctgatgcaagccgtggtatgtctcatcaggctcgtttactgaatcatcttatcaaagttattagcgcctgccatccaccaatctaatcgataccacactcaacatcgacggcgccacagatcgcattagctttgacgagtgaccatttggtaacctgggcacagagatcattaatagttcggttccacttgtttacctttgagatggcttaggtatataaaaagatgtactaagtgaaggccagtacaagattagtagcaagaaaatgtgtagaaagcatagatgagccaaccacaataacgaagaggacgattctatcgtgggcagtggcgtaggtaggccgtactagggcaaatgaaatcatccatccatgccgtacaaatatcgtgtaaagcattttcgtacgatatagtgggattgctctaggcttcctaggtagtgaactgcgagtctcatgtgataatccctgaaaaggctggaacattccaaacaatcatgatgagccccaagcccaatacatggagaatgaccatagttaatctgcacttacaatatcgctaccggctctacacaatgtatataaacgtattcatggccgcttggctgtccacatcaacgattttctaactaacaaaaaagacacggaccgcaattccaactatctatgcgtacaatgatggctaatgtaatatgcactgttgtatggtatacacggtaccagtggtcacatgattttctgggtaccttaccctgtctcaaccatgtattcctagttttcgacatatcatgcagaacctcgtgaagtatgatccacctctatttaccccaactaatacatacctcatatagcaggactcaggacccttgaccaaactttgtcgagacttgcggcgctacgtcacgcctactcttagaaacccaggcgcacaaaacagctcgtgcaagcatgacgaggtcctcagtgggttggtttctcgcagcgacaagggggtgctataattattttagtaatatccagtaaatacgacgccacacttcctgtctacttcacctttctcaatgattcaatgggttccgtcgaggctgctgataagaatccgaaagcatccgagtcgaccggccactgatttaaatcgttaactccggcaattccgacatccttctcgtgcttttgcataagcgccatagtaattctaggaatagtattggcgtatattgtgtaggtctcagtcggtgagcattctgagcattgatccaagcaggctgtgagaaatgtcagcggcgcactcactcgaacgagccaaggactaaccaatctttactctgccatttgtgccgagcagtattccaccacacgacagtgactgatgcgtgagtccaaagctactgagatagcataggccgtcgagaatcttgtctgttagtttatcgacgaaaatggagacgataagacttacctgtgacattattgcagccagttctaattccgtgggatatatatctggagaagaaaccacattccacaaagtgagcgggagatcctcaacgaaaaaatacacagagtttgcatctatatagcagtctcgagatgagaggatgttggcatgatcgagacaaccaaatcgttgaattagtctttcagcatccgctttgggatactctcgtacagctcgcaattgagatggattggaacgatgggttgctatgataacttcccctgcgatgtcgcataacagggctggtcgatacttattccagggtgactcttgcctcacaatcagcaccgaagatatatccccccctagcctacaaagctgaggaagacgtaaggttctgagaggtccctcgatggactttttcatatgctggtgacgtggcgggcaattcctctttcccaaggatttgtattcgggacgtgtcatatcttctcactaagacaaacaaaaatgaacctgggattacagtagccccggtgggtgctggtggcttttaataaaatttacttttcacagatgccatgcatgcaggtcgccttccgactttactgcatgtctgggaacgttcttgactataaaacttcctttcgggagcccgtcgccagcctggttccagtagcccgaattacaatagtttggaccgctctcaattctaaccgctctcaattccaaccgctctcaattccaaccgctctcaattccaaccgctctcaattctaaccgctctcagtctcagccgctgtcggcttggagtgctctcagtttcttgactgcactaatgatgacctccccaaaatagtctcaaatccccggataccttaccttgtgtttggcacttctactagcaatactataacaggttgaattgagctgcgtgggggattgccacatgtcaaaagcagtaccagtgaaagatgttaacttgttttagtgtaattcaccaactaatccttacgattagttctaaaggctactgtcctaggctgggtctagaaagtctattacagcaactttgtcaataagtgagggtttgaaaatgtacccgaaatacggtctttggctacatgtacactggcgagcagaccacactcaagatgcacgtcctacgcatgctacctgtgttatggtcgtccatatttccaaccttctgccaacttagaaagatgcagcagaaactcttctctacgaaagtgttctcaagctccgttttccattcatgaggcttgcgattacttgtgtacaaaaattgcaaacacccctcagtttcctcacaaattttggtgttggctaccttgttatgtagtgtgacaaagtactccatagttcgttgcaacgacccaaaacagtaatcgctggcagcttcggtattgcttcattggccgactcatgggggccatagtcgggtggagatttgtggaccgcaggctgaggacgttgagcctacatgagttagagacaagacgttcaagtggccaaaaaaagaagcaaattcttactatttcctgtttagttgggacagcgacatcggggtgagaatagtaggtatagaggcggccgttcggcatttccataactacccaacttttgattgaatacaagcgccagaaatcattgtgacggcgtagaagattattgcggcgcttgcgcagctgttcttgttttatgcggcgcttgcgcagctgctcctgttttataggactttcaaccggcgccatttagaaacccgatgttgtcgaactgcagcaacaaggagatagaaagaagcggcccaggcctgttatccaaatctggatttatataggtagaaccattgctccagacacgatggtgttgagtgacatattgctttcagagccctctaaaaatgccctggtcggttaggaatcggtcaagtgtgttcgttcgtccgcgatcgtgcagcactacaagcgtaccaccaataccgaaatgagatggaatttagattcctcaactttttgcttcatctgtcaccaagccctgcggaaaatctgcattccgtcttgttgcaacaccaacagaaatcgcaaacgtaaatctaagtaaaccgcaagtcctatcaaccgctgcgtctcctggagatataagattgtagagataaataagtcgttttcccattcacctcatacgcaaaaagttccacatattcgtcgtcgctacgcttcgaggtttttcataattcgtatccctaatttgccaatcagtatgtatcataccatacatactccccgacgaggggtggcacggactaggaaagaacggctcaatcacggtaaggcccccattacatggcccgccacattagtataccgacagtctttaaagggttactagggggtgtttccacgtttcgagagagcgtccctaagaaggtgcctttccgcgctcagcaccttgtcctagaagcagtgcaaaaaatgttggagcaaagtggattccgctttatccaacgctggctaccccaggcgtgtcggtcggccgagtgggtttgtgcagagtcaatggagctgcacagactcttcccatttttgaaccaaaatagaaaatacgcatcttcgaaagattttcaccagatattggctaagcttcacagcctaaggcatacagtgtccaatatacgccatgcggcagtccacagaatcgttcaagatagcgaatccttgcttgaaatgcttcaggctgctgttgctttcgctagctgcataggcgataaggaatgtacacagcaactcgaattcctttgcagtactttgaataatttactggttcaaatgaatgagcgcttacaccatcttcagcagagggtattagttcagattcggatatgtcactcccgtccagcagagctgatgcaaaggcgtgcccttcttccagaggcagtccgaaggttgacagaacaaagcgaagacatgtttaatttacaggtacaaggcatcttaagaaagaacctattgttgtgttgatatgaggcaagcaaccaaccccctgctttacaagtctcctgagtgagatcttgtttcaagccagcgataggtctgtcatgtcacgtgatgtaacacgtgggcgacgcggcaggtaaagaatgaccctctgcgaacttgcaactgccatccgcaacgcttgtgattcaaaatgtccactgagattgacgaactacgacgccttttagcagaggaaaatgagaagacatccaaaaccaaccttcccgcttcccttgacggtgtccccaaccacttcttccatggtctcgcagttcagcaggataagacacgatctacgcgtggagatcccgccaccgcgaccaacaaaccgcgccccagaagactcaaagcctctggctctttcgcgaaagaacaagaggacatttagcggttgctgatgaattcttcacttctcttcataccctggaagaaactggagagacaccgggggcagcttgttggctcggaactaaaccttaatcgctttcttcgccagaccatggaggaccatgtttcgaaaattatcgaagaactctacagcgatccaagactgcgacagacatttgggttgagaggatcgatacgctttgagaaccactccaatacactgagccccgagtgggaacttgaggagcgaatgcagaatatcgatattcgtggtcggccacgacgacgttcaccgcgtccagctgcccgagaacaaagcgaaccaaggtggccggagaacctaggctccggcgcgaagcagccggcctcgtgccgatcaattctgcgtctacaacaaccccagccaatcatccgaatcgatccatcgcgatgcagctgatatcaaatagtacaaatctccgcataaggtgatactgggccgcatctatgaagggctggaggatatggatattgatgaggtggctgagcaacaagatgatgagttcccgaaacttccgttccgtcgcgcgattgctggactccttgtgcagccacatgactacattattcgtgctggtacggaaattgaggtgctaagtaccggcgaagctgatatttatctgcgaattggagaattccgggacgcttctgtaccacctctctgttccaaagggagacgttggggacttcaccggctggaacccccaatcaaatggcccaaatcgtcttcattttaccaccgtgggagaatccctcgccttcactctccaggcgctcaagttgtggcctcggcatcaagcttggagacaaaaagcaatcgactcattgccaagacgggaagtggtagtggcaggtattttgggcagtatctgaggaggtaccgtcttccaaatatcggccaccaaggacgaatgggttacttcgaatctccgatacaacggcgtcccaggcgaaacaagcccggtgttggtggttgccagccaatagacgcacaacgagatgcagacgaggaccaatctgaccctgatacgccgagatgggacccacatatatggcgcaatatcagacagggacagccaacgtcaatccatatggcaccagcactagcttcgagggagagggggtatcaccggtattactgcacgttgaagtgtctacgcggaacattgagccggggagagctagatcaggcttgccccaatgtccgtgaccatggaaagggcaccatgttataaatgcaaccacttgcctcaaacggttgcggcgtcagttgtttcagacagttaatgcagattgtgaagtactgggcattcacggttctcggggtgctcttttgaaagttacgctatctcgcacggatataatgtacctgcaaaatgcaccgtaccagagtttgcggaacagtttcggcatgaagctgctgtataggacaaacctctttaccttggaagcatcgaattggctcatccgtacagctacgacggtgccgcatatcttgaacatatgatgttattgagtccgggaggacagcctgtcgacctggcactgaaggaaatgagtcgagattgcttcaatgccaagatgaaggaatcgctctcagaaatgcaccttctgcatgttcttcatagagatccagccccgcgaaattggctgtacaatccagaaagcaaaaaggtagtatttatgattttgaaagggccgagatgatcctggggataacgtcgccaaatcggaagcggatgccacgtgatgggattgtttttaaacagagcagtgcaggcattgtgaggtcggaaggttcaaacgaggatccagtaaacgtagtcacgattccagcgatcacgctaagtaacgtagattatgctcggaatcttcgtgtcaagaattcgagatgatcctggggataacgtcgccaaatcggaagcggatgccacgtgatgggattgtttttaaacagagcagtgcaggcattgtgaggtcggaaggttcaaacgaggatccagtaaacgtagtcacgattccagcgatcacgctaagtaacgtagattatgctcggaatcttcgtatcaataatttcgtatatttacgcttcgtagccgtcggaaattcttttttttttccttggattgaaaacactatcatctaatggcgaattacattctatgcctaattacagccgtacacggatcagatccagcgtgtggtatgattaattcgtgagactttccactgtcgtttccaaatctgctcagcctgggcttctcgaattctggattgctcaagagcaacacgaagtttgcggactgcttgaaacacccgttcattgtcaagcggtcttgcctctggctcgaagtgatactgcaacgtcaactcttgggaaacatcaataatcgacattgtcaaattgagaagattttcaaaacaagaccgataaaactgattctcgttctcctgttgatcccgttgacaaattctttcttccttcaactcttgaagtgacaggcggtttcgtgactttgagcacttcagacgcgttcgggtggtttccaatgccatggtagaacctcgggccagtgcaatctgatgatccagagaatttatttctggtaggtcgtgccgaggaggaagcatcattggcatggaactcaaaatgtctttcggagattccggtgagcgactgtaaatacttgaggcatcatctgcagacggatgctgctcaaccgctttcaatggcattttggacagtatgaatggcggcatacgtttacttcatacctcgactatcttatatgtgtgcgaagaaccaatccctgagtaggcgcttacaatgtaaaggctgaagaccaatccagtgtcattttcttgcgggtcactcactcattttgataaagactccattttcacgttgctttcgctttgcggtatggcggaatattgatattcggaagcatccttatttcggcggccatagtcgaggaagataatacggaaataagatacaagatcaacaacaaatatacagtagaagcacagatcaaagaaaacgcgatgtccagctaaagcgttctatacggccttcaattgaattggataccatcacggggcagcatggggcggacaacatcagtatccgtttctgtaaacttaggtgaggggcaaatgaaaatcatccatccatcctttcaagagaaattggttagttgaatgtggttgactgagggagtgattggtttaaatgtggttgattgaagagtggttgattgaagagtggttgattgaagagtggttgattgaagaatggttggttaaagagtggttggttaaagagtggttgattgaagagtggttgattgagtagtggttgattgaagaatggttggttaaagagtggttatgtgaaagagtggttacgtgaaagagagcttagtgtcatcttcgttgaatcagctagactaacactgtatacttgaccctgcaaaggcgcaatactgccttgtaaagtgatatacggtggtcctctacactatcctgactcctaactctgtcttcataacatatatttcaatcaaacatttcaattatgcgccttgaaaccccttccgtccttggactaaccgcatctgctctgtggtcagttacttactacaccacaactgactgttcaggcgcggggaaagaggttggttggaggttacgaggctgggtgctcgactctggggaacagcatggaatcggtcatggtctctaccgatggtgtcaacaacgttaccttgagcacgggtagcaactgcaaccctctaatcccaagcggtgtaaccgacctctgtgtcaatgccgctatccgttccttcttatctttttgatcgtaagtcatttttttgtgccatccccaccgcaaatatatctgcaaattaacattgcaaggtttattaaagccctggaaatgcgcggggtgggtgttgatagaggctcagccaagaggtcaagatgggcttctagaaactgcgtgtcattttctctatatatagatctcagttacatgtatccagacgcctttgcaattttttccattcgagaccattgtagcaatctccaccggagaatccaaggaaagttgcgctcgcagttagtttcagcatattgtccttttcttgttacgcttcagtgtcatgcctgtttttatttaggggttggtggtcatattgtgggccacaacgatctgtcagtaagactatttgccatctacaaatagtaggtatatccctttcctcatcgacaataccttcttctcaaagcttgttgggccaggccatcccatcagatacatccttgccactctttcaccatgcacttcatcctttttttaatattgagcctggcgtggctggctaatgctacctatattccctccttggtcaaggtcaatgcggctgacattgctactcgtggcgttaacggatatcgttccgtcgcatactttgtgaactgggtatgaccttcaaccacatattccaccataaaatcaaataactcaacaaagtctgtcagggcatcttccaacctcaggacatcccagctgagaaactaacccatgttctctacgcatttgccaatgtccgagcctctggtgaggtgatcctgtcggacccttggtcggacactgataagcactaccctactgattcctggaccgataccggcaacaatgtctatggctgtatcaaaaagcttttcctactcaaaaagaaaaatcgcaaacttaaggttcttctgtcgattggaggctggacgtactcttccaacctcaggctggcctttgaaactgaagcgggacgccagaagtttgctggcagttctgtcgagttgctaaaggacttgggcttcgacggtattgatgttgattttgaagtgagttttccatctcgttcacggtttttgatgctaatgtcagaagtatcctggaaataacaacgaagcggaccaatttgttgataccctacgccgtcttcgtgaggtattttcatgcttcttttatttatgggtctgtaaaactaaacatattcaggccttggatgtatacagctacgccaacacaggcggctatcacttcttactcaccgctgcatctcctgctggtccgtatcattcgttcaaactcctcaacaacgctaacctaatttataggccctgccaactacctgaaagagcaccttgcccagatggatcggtatctggacttctggaacctgatggcctacgattacgccggaagctgggacactgttgccggccatggcgccaacctgtttgcatccaacagcaacccagccagcactcccttcaatacggaccaagcaatcgattactacacctcgcacggagtggcctcttccaatattgttctaggtatgccgctgtacggccgggcgtttactggcaccagcggccctggccaaccttataacggtcttggtgttggtggctggagggatggtgtgtgggactacaaagctctgcctcagaccggctgcaaggtcacaaatttggaccaggaagctgctagctactgctatagctcggggtcgcgtttgttcatcagctatgatacccctgaggttgcgcgtaaaaaaggtgagtacatcaaatccaaggggcttggtggtggtatgtggtgggagcttagtggtgacaagcaaggtgatgagagtctgattaccacggtatgtttcttagtccactcgcatttcattatcttacttactttaaacttgcaggttgtgagtactcttggaggcactggtgctctggacaagagcgataatcagttgagctatcctaattccaaatacgacaatttgaaggcctgctttgagccttgatcaacttgcttgctcaataaagaattaaaggctggcagctggtgcattgcatccaaagttgacacaataaattcgccctcgcgctcatctacctgcactccatctaccaccagaattaagttctaactagtgcgagataaaataaaactattgcctttcataacagaaacagaaactcactttctcaaacaccttttaatatctgcttcagattttgtattgttggtacgtcgacacatttcagcttgaaggtttatcctgcgccaaaatttccacaagcagaggggattacaatgaacaatacaaggaagcctgcacactggccaagggaatcactatttgtgctgggaagaataagttgagatatcttgatagaattttgaaatggacggcaaaggagttggtcaagcacagaagtagtagtagattatttcattaccctgtcccctcccaagttgatttaaccactagaccaaaatacgaatccgtacccagcctagtgggttgtggtttagaatccaactgtcgaaacgatatgcagcctaccgctactatatatatcttcctatgtacatgtatcgtgtaccacttcctaagcgaacttggagcctcgccgaggcctgccgtggcctctatgccgtcgttgtgtttatgctgcccttatggcgcgcggctttgaaaccgttgcgatgcttcagcaaaatccaagacagcctccactatcttggttcgtgatgcactgtcaatcttacctcttccttcttctcctggacactgtacagtaagagtcgaaatcagattcccctttaggcacacaccccttgtttctcggctcgtatccgaaaccacgctaaagaaatgatttcaacctgctcgtaagaatcacctccattccgagccctcggaggggaccggagaactttcaccagtactaaaggacctctgaacgtcagcctaccaaacggccaaaagcatgttaaagtcattggtgcctaaggcatgaatccactcgagccaagggggtgagtaagctggtttacttgagggagataagagaataagtgccaatttacagtgtgtgtgtatgtgtgtgtaattcatttacgctgacccctcgtcgaaacgatatgcagcctaccgctactatatatatcttcctatgtacatgtatcgtgtaccacttcctaagcgaacttggagcctcgccgaggcctgccgtggcctctatgccgtcgttgtgtttatgctgccctccatatacagtattggttttttatgttatccttcaatacaaaacgagatgtaagaaatgctcattcacctcctgcatgatgcacacgtgtagcttcaactatataaggcaagatatgatgtgaaaactttccggcatactgtactaaacctgataagctctaattaactagcctgcggctcgcactggcagagtagttctatctacatcagacggctgcagattcgcaagagcatttgcatgccggggtaggcgtgagagttggagagtgatctgcaagggatatcccagtagccgatttgccggctgaaattaaatccaaagatggactgtctgtaggcgtcgacgtgaatatcggggttggagattgatcagcacggagcgtctcagtagccgatttaccgtctgaaataaaagatggactgtccgtaggcgtcgacgtggatgtcggtgttggagattgatctacacgggctgttccagaagtggacgtgccgattgcagttgagaacgaggactgactgcctgtagatatcggcgtggtcgtctgagaggaacctgtattaccaatgctacacccactgggcaccttaagaccgttttctagcatacaactagacgtgtctccctgtcggttgaggaaagacacagtgccgtttttgttgactgtcacccaggcaacctgctctccattttcagtgccacatatatcaactttcaccgacttatcgtcggaaccggcaccaatgaaacctaaagagtgttaacaatagcgtgagggcctttgattcgaattggatactcacccgagcaatctttgcctttcagcttagcaaaggttgctgagtagcctgtacagccgtggttattctgagaccacactctacagttgttctcgccgtcattgtcctcaataatagccaaataactgcctgccacaacattcccgataagtaaaaggcagttgaaggaacgcatcctggactatgcgcggcttcaaggcaatcaagtgcgatgatggtgacgactggctgggaccgaggattatttatgctcgagactgaattgtgcgctgggagcgggaacgaagctacagtagataatggagagaaaagtactggcctcagaaaagaggtgataagactgtctagcatgccacagattggacagcaaagcgggggtaggtcgtccaagtcgtggttgtcaaagaacatacgttaaggcgatcccaagaagcaattcgactactgtagttgggcccgcaatttctgtttgcccctagcatgtttccttaccactcatcaattatttgccctgcaaagtatgtatctaatgtttaatgctcactttatttcgatggtgcaaagaaccgtctgtaaatttagtgtcttcaggtatttacattaaaccggaaatgtgacggttctttacagtgcgtctcgaaaccggtgcaacaaaaagcgctcttcgacaatcttttcggccccactgccaagaccttagcgcagatcatttattgaggttaccaccacaccgagtttaaatttgctgcggtagccgatcagcagtacagtaactatcaattttacccgatatccaaattatatgaaatatttcaacgagggggaatacaatgctatacaatattcattatagagatcctcaatttagtccggtcaccttaataaatgatctgcgctaaggtcttggcagtggggccgaaaagattgtcgaagagcgttcttgttgcaccggtttcgagacgcactgaacaacaagaatgaggtgcgtttctctttttgcattgtgattatcaaatacactgccaggtggtgcactggcgcccacgtgaagtccagtatagacaaaagagcttttagaacaggtacagtacaagacaacaagtccgctttaaaatcacacttgttcaacagttgagacagcgcaggtcaggacgcatactgtaacccgctacactggcagctccttgtataagttaattctttttgattcaagcaagttgaatggagaagacagagattcggcatatttattgaaaggcactaatcgccattgaggtacgctcttcgaagtccatttctcgatactgagcaggttagcaagataagaaaaggatatttgatcataagtctgcatagacgttggtcgaatcccaacttgttctcgacgctggatagcttctgtaatggctcttattaattgaactattctcatatcgcattactgtgcggtcaacatgccgagggcagataaatcctagagcggttaaagttgggtgcggtcaaacccaacggtctagattatcttaattcaaagaccacaactacgtaccggtagacccttgagagtcgaggctggttaagcttgggtgtcatcaggtttaatcacgtttcatgtcgtgaatgctgaagagtgctcctaatcagtggcatcttagaccaggtaagcagtatttttcattctatatcgtaaccacttcaacagatggccacgcgctaccccagttacatgtaggttgacgaacgaccagaaaaagccctcacataacccattcgacatctattccctaatagccccacccctaccaacttcaattcaacgtttacaagctcgcttgctggcataggcaacatgtcgaggaattccttcgctattacaacgagtctgttggtctaaggaggatcgcagatcagcttagtctgcaatatatataagggaagacttcttgtgctctaccttgcctttcaccatacatatgtacttgatttcctctgccacttcttggctttccatttccgccttagtgctcagtccttgccgctttttgctcactgagtagaactgagcacgcccctaagtattacataatcacaacgctcgctcactgagcatcacctgatcgttacataagctggatgactgactcatgactcactgagcgtcacctgagcgctctgatttgctcactgagcagcctgatcttacttacaagcttgacctgagcgctctgactaactagctcactgagcacgatctgattattacataagctcaaggacttcacgtattcggtaagcgagctgcgcgcgcaagccagctgcgcagcccaaaacacatagtaaaagtgatgcacttgtcatttatatttcaacaaccaacgtttttatcatattaaatttcttgccgatagcaaccgataagcatttttagtgttatatagcagtttcgcctagatcaaaaacatgcattgtcatggtttcaaaaaatacatcgctacttccaagaaatatatatttatcgatcatatctctatcaaacacctattagattcctataaagtctagataatagctagatgtcatataataggctataaggaaaagttcatatacataaccgttgttgcaatatcatattgtaatttatcgcttttaccatgtgttttgggctgcgcagctggcttgcgcgcgcagctcgcttactgaatacgttagttaacgtatttcactaccgagtggccacaaccaccgagcgaccatctctaaaacacatagtaaatacaatattttataaccttatatttcaacaaccgcgttattatatgatttaactctcgttagatagctattgataaggattcttaacgctatatatgaatttcaagaacactggaatgctataatatcatggtattaaaaattacgttactcaaagccagaaatatatataacgcaatcacaaagtcataaatattttctaaactccctagagaagctatatgtcacctaaaaagcattaggctattaggaaatctcgatatagactaccgttgttgaaatatcatgttgtaatcaatcgtgtttactatatgttttggagatggccgctcggtggtagtggccactcggtagtgaaatacgttactcactggagcaaagcgggcgcggggagcagctaagtcaacagctcacctcaataaaatgcaccacgctagccccatccaaatgcagttttattcaccagactcttgaccattgtcccctcaacgaaaggctggcctcatcaatttggcggtcgatcctggttatttcgcctccagctgagaggccatttgatagtagggctacatttattggttttactattttgcggctatactactattcaactcgccgagtctcgcattctacaatactatctctacatagttgcggaagatatccagccctcaaattttggttctacaatctcagaagaccccaattaagtggttcgtaaattcagtgtagtgttttattctcaaaattttgtcattatttttctttcccgcttgaataacaccggcttatcgctcttactgcctacccacttgctcctaggaataccacttcagctaaaaatattctagaccaatcgatcatgtctactgaatggtctagccgcccatgacgaaatttgcggcccctcattcgcccaacatattcaaactagcaatcagaaaatatattatcctagctgacttcctaggagctccagatctttcgctgtaaatgataccaatcctaggagcttaagtgctattcgcgagaaatatgactactaatgctaagtgtcaaagcatataaataggaccccgatccctccttaaaggaaaatatcaggtttcaagcatttctcttcaaggtcccgtaaagacttatcataagttcaagcaaccaccagcattctagtccatcttttattaggcccttagccaaggcaaaagcctaactattatacagattttctaataccgcagagaaaagcgataacctggtcgacatctaacatttcccattcgataagagttataagacagtttcctacaaattccagagctctaagtttattatatatggtcaagacctaagtaggaagatataagtgactctcattataccagggggagcgcgagagtttacaaggggcttatggctgactaaattcagtagtataaaatccactaaaacctaagagaaaacagatccaagctttatttaccagtctaattacacgtactaaaacccactttaattgcacatactcttttatcattaagctagacgtaaggagtaaatcgggtatggtatgcttccaccgattaagctagactaacctcccacgtaagcgagcttaattagtgatacccattcttctctatgaattgccaggtaccgctatagactagactgcggcacgatccacaatatccgcggatattttttgatatccaagatccgcagccttgcggatttggatatggacctcatgtccattggatatttgcggatatccaatggatatcaaacaatacaaacatgcctagactcgtgacctcgaggggtgtgcattaattttatgttttcctctgtatttttcgtgtaatagtatgttatgtcaaataatcaaaatctggatcttttgggggttgtatgaatttaaatcttcttattcattcatatatactatttatagatctaactgtgaagggctacggtcgaattgagtcaattaaacggcgcctgtatgctgtttagctaaagtttaggagttttactatgtaggaactccacgatagtgttatacattcttaaagttgtagggtggtgagcgccggtagttcctgggccccagcgcctattctctgacctcggtcagaaatcctcttatagcaggggtctctccctcttttatgaccgtgttcagaaacttgggctggggggagactggcagcgtgcacgggtaaagcccgagctctaatactggcactatcccattatactaactggaagccatctggtagccttggctgttttcgaatccgccctgaacggcctggtatgctcctatccaccggtatctctggaagctcatcatcctcttcaacagcgtcgtatggtcgtttttgaggttgttttccttttacccgtctacgtcgctcggcactatcatcatccgagtcattatcaccgctctcagtgtgctgggtagcctcgagtccagtctcttgatcctcctcctcgttatcactgataggctccaagacctcaagctgtggtaatgatctccgggtttgatctagcaaagcagcttcaccttgggatagatactctttgataatccctagctcctcatgtcgaagatcaaagttggtagcaaactgatgcagcatcaggccacggattgtactcggcttcaattgaccacgacggtaatgacagatatcacgagcacaattgaatagtcgttcaacaccagcaccactagcagggatagatagaatgtcccttgccatccttgccagggtcgggaagctctgctcatgttccttccagaaaagtcgaggtttctgtcgctcagttccacgagcaagatatcgtgcaatctcgttgtcatctggttttgcaagctcttccaatggctggttttgcgatgcacaagcagcatcaagatcacagtcatcattctcatcaatggctactccagaagtctccagtgccgctaggtcattggcattataggtaagcatcttcctatatcgatcaaactctcggtttaggacctcttgataacgattcacataatcaatatcgccctgccaatcagtcgaggaaaagtaccggaccttctttgatggagagaagattgttgctagagcgtagatgtcaccataaggctcgtattcggtggcagtgtagtacttggagagctttttctttgctgtttggagtgcccgcaacatccgtttcttccagatcacacctttattcttaagcttcgcctcggctgcatcgagatgggagaaaagcttgttgtagatactgtagatattgtgtgcggtaatatccttggtctttgacagcatcattgtgaaatcaaagaagggctttgtcagaagaagaagatattcgacttgacgccactcttcttgatcgagcttgaaataaagatattgatgatcagtacaatactgatcatagaatggctggagcttcttggcccggttgagcatcagaaatgttgagttccatcgtgtccgaacatcttggattggaatcaatgcaggctccggctgcagggccataaatgcctcccgacgttgtgggcttgcattaatgaagactgctagtcctcggatcttccatacttttattagtctagccattataaggatctaggggtagaagatatacctttttcaatgtatctgtgatctggataccgccggagatattgcgcttattctagaaggagtgggttttttcgtcagaccactctaactcgatctccttattacttggcactgccttaagcttcccaagaagctcattgagactcagttggatcacatgcgcgatgcatgggacgcggaagatcgagatatctgatgaatgctgagactgaaggttctcctggatactctgcatcaaagtattgttgttggttgcgttgtcagtggtcactgacaggatacgatccgagataccatgttctgttaggatctgggtcacggttttactgagattttcaccagtgtgggagccatggagaggctcaaagcctagaagaacctcacagtaatcccagttatgatcgataaagtaaccagtgatagccataaaggcctgctggaaaggagaagtccagcaatccaaggctatcgatagccggcacccctctggaagtctctgtagaatccccttctggttattctggactgtgatatcgagatgacgtcgaatggttcgtgctgatggaatcgtaagtttagtggatgattgctgagcaacctctaacatgcggtggaattgggggtgttcgatcactcgaaagggcagatgtgcagttgaaatgaatctcagaatagcatcggagagacggtcttgggtgaatgatatactagtggtacctggctagattgtagtacttaatgttagctgctaaattataaagaacttgcctactgtagtaacaccagttaagtaacccggttaacatatcattcttttgataagctggtcgattctcgggccacttttctttgaacatgctccagttttgaggtgcgctgtcataggcgaagaaccagcacgccggaatcttggatggccaattgtacagaggcatgccttacacataaccttcggctttccatttttgtcattcgcaacctggtagaagctgtcccagatatccgatttgctttttgattcccatcgaattgtgttctttacatcagactgagatccatactcagttgtaagccaccaactaacgaatttattccgtaagtcctccatatcatcacacatagaatcagatggatataaaacccagtgcttttgaaggggtccgacgcgagtaagggataagggcgcaaaggttgaacgagttgaacgagtcggcgatatcgatgggaccggtgtttggatacccaaaaaatcagagaagttgtcaggataaatccgatcagaagctaaatctatatccgaattggtgaatgagaactgtgattgagacattgagaagttaacaattataacatgtaatatagtagggtgcttaaaagaatagagaggcttacatctgaactagtagaggttttcaggggtaaagtaaacatactaggatattctgacttagacttgcttttgatgtggtttacctagatgattggctgtgttgtatattagtgcggataattggaggatatcctgcggatcttgaggatatcttgaggatattgcggatatcttgcggatattttgtggatatgttgtggatatgttgtggatattttgtggatatccacaagatatccgcaagacctcgaaactcgttaagtccgcatttcgagaacttctatctcggatttctcaagttctagtagtcggaacaaattaaaaaaataatcagtagatagatgggacttttagcttttatttgagcctaaaactaaaagaatttatctaataataacagttttgattttccatgttctgtttcctacgaagtttattatggttgacagtaggtaaatatatatttctacgtgtaacttaccacaaaatcgtcaatctacggccacctttacaatataacgtcggactaagaaaactataagaccacctacaaatactgtataaggagaccttcgatacatgtctatttcctaaaatttcaaagtgccgaccgtcgatttaaggggttggttctgtcaggactaaacatgcgtttatttcagtggtaaggaaatattggtaagctgcattaagatcatgtgataggctataagggggaaagtaagcgagagttatgctagtgcggatatggatatgaactcatatccgcagtgcggatgtggatatcaactcatatccaatatccgcaaattgcggatataaggatcgatctgatatccattggagcggatatgccgcagtctactatagactaacagctataagggatctaagcctttcacaaacttagtcaaaactaatacttatctagatgagacttatacggcacaatactactacattagaaacccagaataccctaggtagagtttagtattactacaaaaacacataaaagataagccttcgccccctcctatcactaataagcacgattccttgtgactattaccggccatgccataaaaatcaagagcctcgtttaccagtctttagtctatatcattccactccttttaccccctagctttaccttgtctaactgggcttctgctgtcgtacaggttgccacttcccaacccctcagccagagtaaaagcataacatggttctttatacaaattatctgatatcgcaaagaaaatcaatagcctaggtgatgtcgagagcatttcgacaatcgcttagtcagggctgttctggcttcatatttggtacaattgctcattaattaccgtcataagtcaattaccaaatttctgtccaacctacacagccaccactttaacacagatcagccacagtgcgtgaagcaactataatttataaggtacccgaaataggtatggctatgtataatactataatcactcattatcgttgcggcttataccacttttggcctactatcacatcgaatatatataaatcatagggagctatctaacaaatattaatttatgaaattttcctagtaaaccttgcttctaaaggcttttcagaggaagatatcgtatttaaggctcgtgttagtgttcaagctcatatagtagcttaggtgttttatcactaaccacaaatattgtgtctttctggcctttaacgcctctgcgaagcctaagacagcgctcgttatcctgacccgcgagatggtgtctggtttacctttcctaccttcacttgagcctcctagcagactcgatatgctattaaacgagtcccgagcttcactcctgaacttccgtcagatttgcctcaggtttggacagtccaccaacatacatatgggtaattgtttcttgtgtgctgcactcgcaatgatcgttcgtcgaggaatcaataggcgttagcgtacgtagataaccagttgtgtcctgtgggtagctgagttaatatatacgcacgattcctaggcagactgccgtacaatcttctggtgtagatggccggaaatgccttcagatcactccgtattctcgaaacccaatgcgttaggttttaggtcgagacctccgacctaaaacttattttgccgaagtctaacacggtatatctttaccgcagctgcggcggcggtgtgcagtttccacctactgatattattgtcgttccagcagagcaacttagactccaactaaagaagaaaggaaacccagtgaaaaataaagaagctgaaatcacggacgctatggcgaaaagaatttttccaagcccacgagatctggagcaaaacgcccacaagcggcggaaagtgttaggattgcggaaacttggaacatgacttccatgataattcaatttttcactttgttcatcgcagactcttagagtgtatttgaaggccacattagctaaggcgaggccctataatacacagagtactccgtgtacgataatcccttaagaattcgactaaacccatataatctcgactccctgcggcgccgggatggctcttgtccaagtcgtgaattgtccgttagattccttgccacgggattctaggtttttaccaatttcattattgaatatttttcatttctttgaactttttgaaaccactctaactctttttctgaccctaccattcacaatacatgacagagtacacttccatgtagccctgttcgcatgttccctggtcgccattgccagaataacaagtagcatcccgatatccatcacacacaaacttgccaaccttcactccgggtttgcctataggaagatttgttccttcatatttgcatgatttgccataagctttgaaaccgctgtctccattgtgaatcccgttaaaagagccgtccttctttacaaagtcaggagggaaagtttcagggcaacctttgctaccagtggaaccctcatagatctcccattgagcctcactctctacgttagtatggtagtagaagagctcgatatgcccagcactgccgccactcgtcggggcaggcccagttgcagtggttgtcagcccctccagaacggacagagatccaaacatggaagagaggaccgattcttgggaaatagcgctgctcagaacctcggcggggtcttcagttgtcgtaggccagctttccatggtgatcccatagccgggcgcaggtgttccgatgatcttggtcgacgatggggtgaccgagcacccggtcgtagtagagcaatcgatgtcacagtcggaacctttaatgcaaactgtagagcacacttgcgctgtttcagtgctgcactcatcctcatcgtcgccgtcagagccaatcccgctaccagtaccgccactgctgccgccgccgccagatatactgtcgaaactaggcgggcagcccaaacagccgcaccatggggcacagccgtgaccgctgcctttgctgtctttgctgacggtgggtgtgggactacccgaggaccaagtaattgtggttgttcccctgttgatttgagtgtccttggctgtctgggtccaggggtatggaggtggagtgagcgtagtggtggtgctggttggagtgggacctgatccgaatggagggagtacatataccatcaggggcaatgtaatgctgcttgtcatctccacagacgaaggggcagtttggctcgcattgatcgatactccccacaccggaatttcggtcatggtagctaaaacgttagtccgaagctctataacaatcaggttgaagatggatggcttacatgctgggaaagataccgtggcatacaccgttgttttcttgtatccccgataagtggttgtaatgccttcggcatcagttgacgttctggtggtcaagtagctctgggtaattggggtggtccattctggaaccttgagggtcgatggagattcaagaggcagcggaggtaaaatgatggagcatgggggttggcattcaacgaccggtgaagggtcatcccagatggaaggggcaatatacacatctccagatccagatccggagttggagcccgatttactggagtcttgttccacacaggctccttcaggacagtatccacgttgacaagtgtattcacacatgggcccatatattgtaacatcattccctggggcagctgtgccggttttatcggttgtaggagccatgacattcaccgcaccctgcccagtgcaagtgcacgcgttcattggacagaagccatgtgtgcagctgaagtcgcagagaccagcaaggttaccctcgccagttcccgatgtgcaggctggaggaaggaagggcgacacagtaggtacagtcaacggaacctcttcggtgccacagctggagggtgggcaatagccaagattgcagtcgaagttgcaaagtccactatagctggccccctcgcctgcgatgggatatccgaccactccggtcgagttgggcttcttgtatcccaagcccatcttcgtgcaggtacaggcgccaagcggacaataattgtatttgcaggagaactcgcaaagaccagcgaagttgtgtgcgccagtgccgttcttgcaactctgatcggacagttcttgcttgggcgaggttgacaccttgttgccggttgcactacccacccaggcattccagttctgaatcccattgggacagcctgacgagattgactcaccttggatagtggtgataacaacgttgttgcgcatcagtgacactgtcacaggtccagtacgaccgtcaatatgctggctgccgtggtaggcaccgatatcatcgtctggaactactgaccatgcagcagttcgagcgtccccaccgatggagacgaccactccggaaaatgaaccaagcacagcggagaagaagatacgatcctgggccatttcagcaggcggaaattcaatctgcagctgctgcgcagtgtttccactggtgcctccactggcacaggccgccccagggctcaatcgataccaagagacaatgctctcttcggagatatgggcggtgccctccttgtacatatcgatccagaaggggaggtgtttgcgccagccatcgtggggcatatcggtcacgtagttgaatggtgcctttccaatttcgaatgcctccatggacttgccataaagagggccaatgtagtgagactcgccgtagtcattccatgagataatctgcacaaactcaggctgtacaaagagtacttcctgccagcggtcatgccagaggtggtctcctctccacatccagttcttcttatacccaggcaagttggtatagaaccacggagaaacaggcatcatataaggcattccacccaggtattggatgtaggaagcgtcaatataagtgtccatatcttggggaccccatggccatcctgcccagctgaacagaccatcgacgactccagtttcaacggagggtttggcgcccagagaagaccagctcgggataaagaagcagttggtagcagacttgatcgaaggccaatcatcggcacggccaggaccttcaaaggtagacacaaacgcttgacctttgtaaaagaagtatgaggcatgtgcgctatactgattgatcaggttggtgacgtcactcttcggccaattgccgtttccagcataatcgaaggaaaagaagagtttgaagccgacactgtccgctgctgaaaatgcggctgggagggccttgatgtttgttggatcattgtaggccatgttgagtgcaaaggcgtcaatgtgcgcatcctgcgccagtttcatatcgttctcccagtcatcagatgtatagttggccgagttggttacctagtctcctgttaacaaaaagtcaagtttttatttcactgggtagatatcctgcttaccatgaagtgagcaaagacagacgctgcctgcgcctgacaggccagcgtaagcaccgtgatccatatcaggaataaggacatgctggtcattgcaaacttgaaccctgagaaaggaagcgaggtatcccaacggcctgggataactgtccctttttgataactacgctttatatcgtccaaccattttgggcccttgactccgagcagaattgagacatttctttctcgccatctccactaaactagtcgaattgcgtcgggtaagtcggagattgcatggtcgcgacctaatttactagtagtcgagaggcgtcgcttcatgaaattgcctcgcgtgtactagtaatataccgccgtcaaaaatctatgagctacgctagtgctaaaagatcgacccgctaagtggatcatggtcaatgtaacaatatctgcttagcgtgtgcggcgagggaactaattgcttggcgtgtaaggcgataccaaacgaagtataccactagcatctttgcagcgtagcttagccaccaaaagagatgccaagaatgcaaccttggaagaatgcttagaaaggcttcgaggtaaaattgacttggaccattaaaatgtttgaccgcgagaaggctccaacggcctcaagttatgccatctcttcaaagatcatcaaaaagggaactagagagaaaagtagaaagacaagtatcaagccaatcataaagccagtcagcgaaggttgttgtagttcggaggtatgaattgacttatttttttcagagcgctagttatatgagcctgtatttacaacgatgagccaagttaatttcctatcaacttcgtcttgagtatagacacttcggagcaattccgacagtgcgacttttcctgacctgcaccagccccatactacaaccgaacaaaggtctcctagcgttggagccggactctttgcgtggccttcaacttcagccctcggagagggtatactgattcgtagagtcgcagcaaattttccaataggctacagattaatagctcacaatttctcagctattatttgtagggactactcgttccacacccatattccttgctaccacacccctctaacccgaataagctcagcgtttgagtatcttacatgaccgctttcttccgaaattatccaatacacacagtacttctaatcgttgaacacatagtactctgtagtcaactatatggctcctgtataaaacgataccagtaataacagcgaggtgtagtagtatatacatatcccaaattagtcctaaatataaaacagatactgaaaaattattctgcttccaggtatctaaatggtgtatcttacgtaattttatatagcagaatggtcagatcctgtggtaaattttctgccaatagtatgcacgtaagaaaatacagtgccatgtaattgaggtgtctaccccctaatcgggttagaggggtgtggtagcaatgatttgggatgtggaacaagtagacccctatttgtagtgactcaaataaaccaatttgataccctaagtacacaaaaacctgctcctcggtcagtttgagatcacaagcttgtactgccgttgccccacatacgcaacttgcatatggtctcccagttgagaaacatatcctcacaatataggtacttcaatgatggtggccatttccgtgctggcggccatgtctgtgatgacccactccgcgcttggcccggggctaaagaaacaaaccaattgttagcgtgaactttcgagccgagaacaaccgaaagaccaaaagcgtaccggatagctagtctccattgccacgccagtgctagtcacagcgatgctggacgatgggccgggagtagcaactggcagagtcgtattgatggggtcacacccgccgaaagtgaagccagcattatccgagatggtcaaagctgcagtacgatgaagatcacaccgaccggaaagctccatgtagatccatgattggcatttctcgaccctaccgcaccagtcttgacattcagcggtcgtattcatatcaaaggcgaaagtgataggggcgctgttgtaacaagcgattgtgtcatttcggattgaggtccagcattcagatgagacctcagtggccacagccagggtagccaaaacgacgaaagagtagatagggaccatactgccaacgataggttcagaataagagtagcgaatagatattcggtcagttacagacggaattgagaatatatggcagactttgtatttttgcctctttgcgagccctgttatctcttcggcgtgttgccaagttcaaactagcctactacacagtccactggtcctagtctgggttttctcggctggcaggagactttccaggatgagttcttcggccaattattcaccatctccgtgtggattgggtagcttttggttgcatcgacacaaaacttcagatattgaatttccgaagaaatgaaatcctcctgtgccgaacagccggaatgtggataatcgaaagttttggttaggtttatcgcgtaacgaaacacttagattgccttaaatccacactctcaggatgctagaagaatatcaggacgacaacggtggatattttaatttgccagtcaagtatggataagtgcacaatacatactagtaacaagtgccgccacaagcctgtgtactagctcctccatgtctcagagatgttgtcccactaacgctgacgttggggccactttcagcctctagaccactaagtgatcgccaagacctactaagccgccactaacgagccgccaagggtctgtaggctttaagtgatggtccacaaaaccatggctttgtcaaaatatgtagacttattactacacactagcatgtaggaaatttgcaatctccgaggttgggtcctctcaaatataacgcctcaaactgactgcagcgtgcatacccgcccgatccactagatccttgtctaaactgtgttttatggtgggagtccattcggttcccaacttcatgtctcagttgagcattattgcgatggtattttttgcctcgttatttacctactttatctactaaccgaaggtggagggcggattgtaccgaagtccgaaccggcctctggcgatcaagggtatataaaataccgtccgcacaggttgcctgatttatgtgttataatcagtgttgctactagttcccttgtccgggaacgactggtccgaatcatgtattccaattttgctatcatgctttggttgctgcttgtgccttccattatcgccgttccaaccatggatgccttgttcaagcttaaaaagaacgaagctggaagtgacacggacagccttggtggctgtgctaagtatctcgacaaaatacttccaaggtggttagccgaaactagtgacatggttgatgctggcctccaggtattcacggatgccggaagttccaccgatagcccaaccagaacggttgcccgggattttctccagacctatttttacatgaagataacggagacggccaaggtaaaggtggtgaagggtgggtttctcgccgcttatacagccttccagattacgttgctgacctcatttaagacagcatcaaagcagtgaggacatttctcgatggggagccgctccaaaggggcacgccacatttctactgcggtgacacatggctcgaaaaggttccgaggagtgacgtggcttgggattcgaatgggaacgatttgatgcaacttgatgtcgatggggttacgttgcgtcctgctacatttgaggaagtgccagcttacaaagaagacttgttttggactaacccaaacacgaacatgcaagagaccactggccgtgttccttattggtcaccagatttggcttcatttctttttgactctgattacgatgggcgaacttactgcgcaccaggaaacggcggcttgggtgcaacgcaacaaatgacgaagcccgctacgatgaccttctgccctcttgctttcgaatacgacctgaataccgaggttttgggagaaaataagccttcagcaaggatgtcaattacgaaggttatcccgcgaagcgcaactctctaccatgagctcatccacctcgtcgttggtactgacaaaacacaagattacacttgtaagttcttgtcggatatgttaggtcagaccaacgctgataacctgaagacgaatggagtaagatgcaaactgcgctcaagaagcccaatggtacgccgtcgaagaaagaagaggaaaaaactgggcaatattgggatggaatgaaatatcaggatatcatgcgtcaaaatcctgagacatttgtcttcttcagcgtggggtattggtattttctgcagactacatggaacaagaatgcgcggaagcggtggagcttcgatactggtgcagctcggctcgtggcgatataggcaaatgacgaaaatggaaatggacattttctagaagcgaaatcgacaaatttggtacacaatcactgttcaaagtttgacagggccttgaaagctgcctttttgcttctttcttatatacagttgcatagaaagcactttgggatttgggacttcacacttgtcctcgcttgttttcacttgtttgtcgctggtttgtttcgtataattttgtacggcagaatacggagtaagatcgtgagagttgctctattaagggtatgaggaatttagtagtagtcgctaccaatagcaaagagtaaatttcaaatcaaaaacaaagacattcaagcaagagtgattggcttgaaatcacaaaactcttccttccattccaaggctccgacgctttctagcttatcaacaaacttctctagtagggttctcgcgtcccacataagatagccactgttggaatatttcccaacatgcctatactcggcgctctttgcgtccgtccagaagtgcggccatagcatcaactgagcttcttggccatgcacgagctctgttccaatggcccatatctttaatggaaggtcggtttgacgacgcttcacaccatgccgcacaccgccaatccctgcagccggttcacgaataccaatcaaatccgaaatctgagtcttctgggcatcggtcactggtgtcaaaaagtatatccagaacaattccacgtaagagcacgttaacgcatcaaaccagctagggcccacatagtcggagctcctctgcgaaaatgtctctcgagaggacgtagctctgattcctctagcttcgaggttctcccgatagagctgggcggaaggcgaggccatgaatgccctcatatccgaggctctctcccatgcttggtggcagttagcgggacgacctttgattcccggttgatacacaactcacctgtaactaaaagaattgtatccgggcgctcctgcactcttgcatacccggaaccctcgtgccctggggcccgaagcagtggctggaaatgtccagcccattcggtatccagctccagtcccttggaaacttgaaactcggtccagattaggattgcttggtcgttgaggtcgtcaacctgtgatcgatctatagtatcatctcccaagggcgccatgactggagagggttgattcggatctgaacaggatttttggagagaacgactgggggcactggggttttactaagggcactagcgctagcgttgtttcgcctttggccactattcaacgcggtccctttcgtttcaatactggtaatgctatggtaaataaaccacgtgacatttctccttggcgttgtgagaaatcatattagtcaccatacttcgaatattgaagctatttgttagagtggtcacgtgattagcatgtgatcagccacgtgatcccaccgagtcctagccaatgagactataccgccgccaagtgcggttgagaaatctgggtttttacaaggatgcggctagtgatgggcgcattgctacagacgttgtgaatcaaagcacttcattactcccaccgttcatgcacgcgagactaaggccgtgcgttgatcaccagagccggataatcccgcaatcctctcagagttgactccgctttgaaatcgtaaatcaaacccgcctgagacaggaggtcagtaatatcccgaatacacaatttattagcgcccggcagctaagccgaaagggcaactatctttgatctactatacatgtcataatatatatagtacgatgtctcctccgagcccatacatgaannnnnnnnnnnnnnnnnnnnnnnnnnnnnnnnnnnnnnnnnnnnnnnnnnnnnnnnnnnnnnnnnnnnnnnnnnnnnnnnnnnnnnnnnnnnnnnnnnnnnnnnnnnnnnnnnnnnnnnnnnnnnnnnnnnnnnnnnnnnnnnnnnnnnnnnnnnnnnnnnnnnnnnnnnnnnnnnnnnnnnnnnnnnnnnnnnnnnnnnnnnnnnnnnnnnnnnnnnnnnnnnnnnnnnnnnnnatctcagatgtccgtatcgcagcggatcctcgtgggttagtaattttgttagtaggctggcttgaaggcgcttctctaagtgttcaacatcctattttcggcagttgaagtgcgtctactatctgtaacacgaggtggttagtgggttagatcggcgaaagggggtgatttatgttcgtcggcatggttaggtgcctcaagtcggcccgtggcgatggcaaatcgtattgaggcccgtaccgtctctgaccctgtctcactagggcgaacatgccaatctttcggtcggttgggtactggtccgtttcgatatatgagagccacgtctgtattgcttcgtcccccttgaccatctccttggctctgccttcagtttctcggtcggggaactcggtgatattggagaccctccgaataatcctcatgctgagaaattccttgaacgtgacctttgaacctgggtgcagacactcgagcttgcttggatttttggtcagggcgtggcaaccgcgcgcgctggctctccattgactgacggtcgagggcaccttcggtgctggagggcggggtgttggagggggttccatggttacttgaaatctgctttttccgatgagtgtttgtgggagaaagatgagaaatcttgcctttccattaacgaaaccaaaggttgttttgagctgacaaagcagcacaaacctccagggctaggtacctacctacctaggtagagaaacaggtcttattgaggcaccagatgaggtcgtattgatctatacagaaattatcctgcaactttaggaccaatagacgatagtttaatcgaaacttcattgaatgagactgccacaaacattgttctgttgctactatataaatgcgtaggcccgggttgttggatgctattgctattgtcgaagatagacaggttggttttgagtataacgagacgttatagggctgtacttaaagataaggagtactacgtaaaatattaaatgtggatcctaagcaaaagatcttaaggtttcaaacatatatcttcaagttcgtatagccctaaaattggtagtgctacttatagatataaaaagatatatattttgtgatggtggggtaaaaatgcgggtgggtaaaatattttgtggtagggtctgtattaaatagctaattcaagctcatagacgtaacagggccgacaagagagccaataataggattcggctcttcaggctatcggaactggctggctcatatcataacgaatgaagagttcaactggtgccgtttcgtcatccgcaaaactccatagctgagaatattgcaaaagcaagctttctccatgtaatgaagcttgaattattcttccatgattctgtccagtgtatgaaagaaccaataactataaaaaaataagtgagtgcttaggaaatctctagtagctaggaagtgtaagtaagatactaactggatggatcgggtggtcccggaacggccgatcggatgttcgagcaaccatcacggttacaacagnnnnnnnnnnnnnnnnnnnnnnnnnnnnnnnnnnnnnnnnnnnnnnnnnnnnnnnnnnnnnnnnnnnnnnnnnnnnnnnnnnnnnnnnnnnnnnnnnnnnnnnnnnnnnnnnnnnnnnnnnnnnnnnnnnnnnnnnnnnnnnnnnnnnnnnnnnnnnnnnnnnnnnnnnnnnnnnnnnnnnnnnnnnnnnnnnnnnnnnnnnnnnnnnnnnnnnnnnnnnnnnnnnnnnnnnnnnnnnnnnnnnnnnnnnnnnnnnnnnnnnnnnnnnnnnnnnnnnnnnnnnnnnnnnnnnnnnnnnnnnnnnnnnnnnnnnnnnnnnnnnnnnnnnnnnnnnnnnnnnnnnnnnnnnnnnnnnnnnnnnnnnnnnnnnnnnnnnnnnnnnnnnnnnnnnnnnnnnnnnnnnnnnnnnnnnnnnnnnnnnnnnnnnnnnnnnnnnnnnnnnnnnnnnnnnnnnnnnnnnnnnnnnnnnnnnnnnnnnnnnnnnnnnnnnnnnnnnnnnnnnnnnnnnnnnnnnnnnnnnnnnnnnnnnnnnnnnnnnnnnnnnnnnnnnnnnnnnnnnnnnnnnnnnnnnnnnnnnnnnnnnnnnnnnnnnnnnnnnnnnnnnnnnnnnnnnnnnnnnnnnnnnnnnnnnnnnnnnnnnnnnnnnnnnnnnnnnnnnnnnnnnnnnnnnnnnnnnnnnnnnnnnnnnnnnnnnnnnnnnnnnnnnnnnnnnnnnnnnnnnnnnnnnnnnnnnnnnnnnnnnnnnnnnnnnnnnnnnnnnnnnnnnnnnnnnnnnnnnnnnnnnnnnnnnnnnnnnnnnnnnnnnnnnnnnnnnnnnnnnnnnnnnnnnnnnnnnnnnnnnnnnnnnnnnnnnnnnnnnnnnnnnnnnnnnnnnnnnnnnnnnnnnnnnnnnnnnnnnnnnnnnnnnnnnnnnnnnnnnnnnnnnnnnnnnnnnnnnnnnnnnnnnnnnnnnnnnnnnnnnnnnnnnnnnnnnnnnnnnnnnnnnnnnnnnnnnnnnnnnnnnnnnnnnnnnnnnnnnnnnnnnnnnnnnnnnnnnnnnnnnnnnnnnnnnnnnnnnnnnnnnnnnnnnnnnnnnnnnnnnnnnnnnnnnnnnnnnnnnnnnnnnnnnnnnnnnnnnnnnnnnnnnnnnnnnnnnnnnnnnnnnnnnnnnnnnnnnnnnnnnnnnnnnnnnnnnnnnnnnnnnnnnnnnnnnnnnnnnnnnnnnnnnnnnnnnnnnnnnnnnnnnnnnnnnnnnnnnnnnnnnnnnnnnnnnnnnnnnnnnnnnnnnnnnnnnnnnnnnnnnnnnnnnnnnnnnnnnnnnnnnnnnnnnnnnnnnnnnnnnnnnnnnnnnnnnnnnnnnnnnnnnnnnnnnnnnnnnnnnnnnnnnnnnnnnnnnnnnnnnnnnnnnnnnnnnnnnnnnnnnnnnnnnnnnnnnnnnnnnnnnnnnnnnnnnnnnnnnnnnnnnnnnnnnnnnnnnnnnnnnnnnnnnnnnnnnnnnnnnnnnnnnnnnnnnnnnnnnnnnnnnnnnnnnnnnnnnnnnnnnnnnnnnnnnnnnnnnnnnnnnnnnnnnnnnnnnnnnnnnnnnnnnnnnnnnnnnnnnnnnnnnnnnnnnnnnnnnnnnnnnnnnnnnnnnnnnnnnnnnnnnnnnnnnnnnnnnnnnnnnnnnnnnnnnnnnnnnnnnnnnnnnnnnnnnnnnnnnnnnnnnnnnnnnnnnnnnnnnnnnnnnnnnnnnnnnnnnnnnnnnnnnnnnnnnnnnnnnnnnnnnnnnnnnnnnnnnnnnnnnnnnnnnnnnnnnnnnnnnnnnnnnnnnnnnnnnnnnnnnnnnnnnnnnnnnnnnnnnnnnnnnnnnnnnnnnnnnnnnnnnnnnnnnnnnnnnnnnnnnnnnnnnnnnnnnnnnnnnnnnnnnnnnnnnnnnnnnnnnnnnnnnnnnnnnnnnnnnnnnnnnnnnnnnnnnnnnnnnnnnnnnnnnnnnnnnnnnnnnnnnnnnnnnnnnnnnnnnnnnnnnnnnnnnnnnnnnnnnnnnnnnnnnnnnnnnnnnnnnnnnnnnnnnnnnnnnnnnnnnnnnnnnnnnnnnnnnnnnnnnnnnnnnnnnnnnnnnnnnnnnnnnnnnnnnnnnnnnnnnnnnnnnnnnnnnnnnnnnnnnnnnnnnnnnnnnnnnnnnnnnnnnnnnnnnnnnnnnnnnnnnnnnnnnnnnnnnnnnnnnnnnnnnnnnnnnnnnnnnnnnnnnnnnnnnnnnnnnnnnnnnnnnnnnnnnnnnnnnnnnnnnnnnnnnnnnnnnnnnnnnnnnnnnnnnnnnnnnnnnnnnnnnnnnnnnnnnnnnnnnnnnnnnnnnnnnnnnnnnnnnnnnnnnnnnnnnnnnnnnnnnnnnnnnnnnnnnnnnnnnnnnnnnnnnnnnnnnnnnnnnnnnnnnnnnnnnnnnnnnnnnnnnnnnnnnnnnnnnnnnnnnnnnnnnnnnnnnnnnnnnnnnnnnnnnnnnnnnnnnnnnnnnnnnnnnnnnnnnnnnnnnnnnttaaattgtacagagccgtcacctatcatgccaacttgctggctatagactccgaggccttggagatcaccgggggaaagaaaccaagattcgcaactcttaagtagcttgtagagtcgcttaacttcatcgcaacgcctagtctgggtttgtttatccattttcgtgtgagaggggaagagtcaagaaacccgagaacgaaagaaaatcaatagaattgatgatggatggaagtgacgatggagtgtggtcgccaatatgttggatggtcaggtgaccttaggcaggccacggagacgtagacctcattaaaaacattttgagggcgggcactctgaggggccctgtgggggctaatctcttctgggtatagtctgaggtgggctgagtgcatcagtgttgctcactgattggacactgagtatcactcagtcatcctgcacgtgactgatatgagcatgatcactgatctgagcccgtgctgacatctactcagtgagcctgagcctgagcaccctcataaaagcggcggcagctcaaataggaaagccccacccgccagggaatatccggtacgtattggcatgtagagtgatccactgcctgacactaacttagagcctcgtcacggcctttcgtggcccactgccgcttccattgttaggctgccctcatggcgcacgactacgaaaccgctgtgacgcctcggcgaagtccaatacggcctgaaccgtcttcgccctcgagagggtgtctggttcacccttctcaccttcctttgagcctcccagcaggctcaacacgctgttcatcgcgttcccgactttccttctcaattccgtctgcagcatacggagcctcgggcattccgtcagcacgtgcctttggtgctttccttccactcctgactccattgggcataaattttactgcggacggatgcgttctctctcgatagtagcggtcggaagggatgggttttacccggttgcgcggcttccttagcaagtcgatctgctgcatcattcctgacattcccacaatgtcctggcatccactggaggcggagtctgatattctctgcctgaacctcggaagctgcctgtatgattgcaaggccgatctgctgtcacataagattgttgccgttgaccgtactccatctccggcatttgtgcgccggtgggctagcttgaacaccatgtcgaccgcgtagaagatgccaataagctctgctacgtggaccgaccagcgttccatcgggcccacctgcacctgttgagatttcaccacctcttcctggtcgttgagtgcgacgatggcagttccaagatggtcttcacgtccggaagcgtccgagtagacaacaatatcggacatatttctcactgaatctgcccttcctctcgctatttctcgatcgcttccaagctcaatttccgagaatgcgtttgctcgccacggtggtaatggacttgggtcgatcgtttctagctcattcagcctgtcgacgtccatagtcttcagcgcttctgcaagaggaaagcgcgcgtacgatcccacattgtttctacgattctgggcgcgcgataacgcgctccaaatgggatgggcacgaggtggagtgtgtagtctcgctatagtgcgttgcgctcggtggcgaagacggagatgcgtggggggtaggtaggcttccacttcaagcgttgttgtcgctaccgttcggaatgccgataggattcgaatcaatacggttctctgaactgtgttcaagtgtcgcaggtgagtcttgtcccggagcgggtcatgccagaccgttgatgcatagtctataataggcgtaacgcatttgctcttggcgtaagtggcgtagaccacttaaagcgacggtcgtcttggtagcacgtttgatggcctgctgaacgtgttccttccaccgaagttcctgatcaaacaccacccccagcagtttgactgaaggcgatggtttgacgtcggctccatcgaaggtgatcctcccttctaagtgttctcccctctttctggtgaggtggatgagctcggttttctccgccgcaagacacgatcctgtcctctatacgaggaacatcctcggactgtatcttggctaaattttcctcggccgagcgacccactcgctatcggaagtagtcgtcaatgaatgctgacgcgcctccgtgggagtcgacgggctggacgaccagatcggcgttaaagaatgcaaacaagatgggggagagtggtggtccttgcgctaggcctgcattcaccagcagctcggtctcggtgcggaagtcgtcaaatccaatgttggcgtgtcgaccgctcataaagctcgcgatccatttccttgctaccattggaatacctctcgtctgtaacgaggcatccagactcacccggttcaccccattgaaggcgcccttgagatcgaatgcgattaacgtcaccaccttgtgtttgtaccaggctttgtcaatcgcactagacctcctccgagccaaccttcagggctgggatacacccccatatttctcgaggtttcatgtatgtggcagctttccagagctttccttcgccggcctcgtctaggaactgtctccaatgcgaagctttggccttctctatagcccgcgtccacgctcggcgcttttgttacataagttgaaaggctgtaatggtgttgacatgttctcgtccaagctccgcacagcttgcctgccatcttctgcgcagttgattcccttcgacttgttggaccttcaggtctggtgtaaaccaccgtttggagtatggtgttgggcgagtgtcgggcgtgagctggtccacagcctgggctgtagctgatatgagtttctccacaactcggtcgagtcctggccgggtcttaatgcctttccaggggcccgtctgtcgggctacctcctcgccgattctggcccagtccgcgcgatcatacacttttctcgctttgttgtttggcttattctgaggttgaatgttccattccgaatacgtcgcgcggtggtctgacccgtagttttcatggtacagatggcatttgacaagtagttccgggttgtttgtactgtctgatcgatggtcgagctttgtcctggattattcaaggcccagtaagtcgccgttcctcgcgggatacagctgtggaggttgtgggtttggaaaagtcgatcaggtcgcttgcttcttcgataagtcgcggttggatgtagttaccgccccaggttgggtgatggcggttaaagtctcctgcgagaacgatacttgtgggtcgtcgaccatcgcgtagagcagctgtgatcgtgttttggatggcggtgaatgctggttctggcgacgcactatctggcgtgcccagcgggacagatgggatataaacagaaaagaggaggagttgagtgtcggctgtccagatcttgacggcggcgatatctgggtggttgcaaagaatctgccggtgtgaagacgttgagattcgcttgttgacgtagattagactccggaatcgatctgcgccggtctcgggggttggtcggtatagccgccaggcgctgtgattgacatgtgtttggtaggtggtgatcgagggctcttggatcagaagtacatccaagttttgggtttggtggtcattgatgagtgcttccatcctgggtcccgatttcatgatgttcaactgtagtatgtgcaggttcgtttctaacattgatgggggttggacgttgcgggtgtagcacactgtcggtcaccagttgggtgttcaccactacaatccaggcatttggccctgatccctggagggcatcgttgccgctcgtgttgacccgcacaatgtccacaacgtggtgtttccttgcnnnnnnnnnnnnnnnnnnnnnnnnnnnnnnnnnnnnnnnnnnnnnnnnnnnnnnnnnnnnnnnnnnnnnnnnnnnnnnnnnnnnnnnnnnnnnnnnnnnnnnnnnnnnnnnnnnnnnnnnnnnnnnnnnnnnnnnnnnnnnnnnnnnnnnnnnnnnnnnnnnnnnnnnnnnnnnnnnnnnnnnnnnnnnnnnnnnnnnnnnnnnnnnnnnnnnnnnnnnnnnnnnnnnnnnnnnnnnnnnnnnnnnnnnnnnnnnnnnnnnnnnnnnnnnnnnnnnnnnnnnnnnnnnnnnnnnnnnnnnnnnnnnnnnnnnnnnnnnnnnnnnnnnnnnnnnnnnnnnnnnnnnnnnnnnnnnnnnnnnnnnnnnnnnnnnnnnnnnnnnnnnnnnnnnnnnnnnnnnnnnnnnnnnnnnnnnnnnnnnnnnnnnnnnnnnnnnnnnnnnnnnnnnnnnnnnnnnnnnnnnnnnnnnnnnnnnnnnnnnnnnnnnnnnnnnnnnnnnnnnnnnnnnnnnnnnnnnnnnnnnnnnnnnnnnnnnnnnnnnnnnnnnnnnnnnnnnnnnnnnnnnnnnnnnnnnnnnnnnnnnnnnnnnnnnnnnnnnnnnnnnnnnnnnnnnnnnnnnnnnnnnnnnnnnnnnnnnnnnnnnnnnnnnnnnnnnnnnnnnnnnnnnnnnnnnnnnnnnnnnnnnnnnnnnnnnnnnnnnnnnnnnnnnnnnnnnnnnnnnnnnnnnnnnnnnnnnnnnnnnnnnnnnnnnnnnnnnnnnnnnnnnnnnnnnnnnnnnnnnnnnnnnnnnnnnnnnnnnnnnnnnnnnnnnnnnnnnnnnnnnnnnnnnnnnnnnnnnnnnnnnnnnnnnnnnnnnnnnnnnnnnnnnnnnnnnnnnnnnnnnnnnnnnnnnnnnnnnnnnnnnnnnnnnnnnnnnnnnnnnnnnnnnnnnnnnnnnnnnnnnnnnnnnnnnnnnnnnnnnnnnnnnnnnnnnnnnnnnnnnnnnnnnnnnnnnnnnnnnnnnnnnnnnnnnnnnnnnnnnnnnnnnnnnnnnnnnnnnnnnnnnnnnnnnnnnnnnnnnnnnnnnnnnnnnnnnnnnnnnnnnnnnnnnnnnnnnnnnnnnnnnnnnnnnnnnnnnnnnnnnnnnnnnnnnnnnnnnnnnnnnnnnnnnnnnnnnnnnnnnnnnnnnnnnnnnnnnnnnnnnnnnnnnnnnnnnnnnnnnnnnnnnnnnnnnnnnnnnnnnnnnnnnnnnnnnnnnnnnnnnnnnnnnnnnnnnnnnnnnnnnnnnnnnnnnnnnnnnnnnnnnnnnnnnnnnnnnnnnnnnnnnnnnnnnnnnnnnnnnnnnnnnnnnnnnnnnnnnnnnnnnnnnnnnnnnnnnnnnnnnnnnnnnnnnnnnnnnnnnnnnnnnnnnnnnnnnnnnnnnnnnnnnnnnnnnnnnnnnnnnnnnnnnnnnnnnnnnnnnnnnnnnnnnnnnnnnnnnnnnnnnnnnnnnnnnnnnnnnnnnnnnnnnnnnnnnnnnnnnnnnnnnnnnnnnnnnnnnnnnnnnnnnnnnnnnnnnnnnnnnnnnnnnnnnnnnnnnnnnnnnnnnnnnnnnnnnnnnnnnnnnnnnnnnnnnnnnnnnnnnnnnnnnnnnnnnnnnnnnnnnnnnnnnnnnnnnnnnnnnnnnnnnnnnnnnnnnnnnnnnnnnnnnnnnnnnnnnnnnnnnnnnnnnnnnnnnnnnnnnnnnnnnnnnnnnnnnnnnnnnnnnnnnnnnnnnnnnnnnnnnnnnnnnnnnnnnnnnnnnnnnnnnnnnnnnnnnnnnnnnnnnnnnnnnnnnnnnnnnnnnnnnnnnnnnnnnnnnnnnnnnnnnnnnnnnnnnnnnnnnnnnnnnnnnnnnnnnnnnnnnnnnnnnnnnnnnnnnnnnnnnnnnnnnnnnnnnnnnnnnnnnnnnnnnnnnnnnnnnnnnnnnnnnnnnnnnnnnnnnnnnnnnnnnnnnnnnnnnnnnnnnnnnnnnnnnnnnnnnnnnnnnnnnnnnnnnnnnnnnnnnnnnnnnnnnnnnnnnnnnnnnnnnnnnnnnnnnnnnnnnnnnnnnnnnnnnnnnnnnnnnactctcgatctgcactttgactcatgcaaaacgttttggcaacgctctctatcattttggggggtggcaattgtcccggcatgttttctcagctcggctccttgcacctctgatacattcggtgttacgcagtacttgccgaaaacgcatgaatatgttttggatacaataagctatcattcaattgagatgattggaagtattctactcggggcgccatatcacgactcgagccatcttgcacttatcctgtacagctacttgtcacttgattccttaaccacaatgacgttcaacatcataaagtttcgccccccgctgtatcatatccagccaccgtttaacacgtggtttcagcaagaattgtaaaatctactgttctcggcccacattgatggatgaaggaaccaggtccaccgttcattcttttagtctccattacttcatcgctcgaattcgtggccaaccaacatacaagcaactcaagtccgcacatattgccacctgaggtgcaatagtcattggacgattggcgtatcatccacactaaaagatggcttttaaatgtggatggtaatttgctataaaatgttttagaatcttgcctgctacgtagtgggaagttagatacaaactaacattggacaaacttgatcgagaaccgaagaattgtcgacaggtgacacacgtgttgtgctctcctctgctgcgctagtttttgggctgtttcaaattggatgtcgcaggagatacagtagttgtgttcagttccgaggtgctcatcaagctcaaccatctccgcgaaatcttgtggtgggaaacaaatgtagcagatatgatgatatggagagtcgtagatatgttgcagcctcgcgaagaaagttttaaagctgattgcgcagtgcgtgcaataaaattgtttcagaaacatgatccaggattgttaggatgttccccttgagcgttgggagcaagaagaacaagtgattgtttgtttactgaatgaagtcggtgcggagaaaggtggtggggcttttgaccgtgtttgagcttttgtgactcgtaggcccaccctttattccaatcaagctacatatttggtagatccggtcgacacaatgtcaatacgagatgcctctttacgccgagggagttccggaccagattctgcatctggatatggtcgaaaagaatgatcaggaatcaggaatcctgatcattctgatattgccttctgccaggcaaggtgatgcgaaagaatactgtcaatagggtttgcaagaacattacaggtaatttatagagcctcacatcacgtgagagccagtttcaatacgattcggcatttgaaaataggctcagcctgaactagattggcgtgtttcggaatggggtacaagaaagatttcacgagagtaaagtggtgaaactgatttcgatccatgctgtacctggtcatgaagaaacattgttcattattgccgtttttccagaaggagtccagccctttccaaggtattggctggagcagcttatgtcttcaaggaggcactgaattatagagcaatttgtttgtctcgagctaggatctgattcctcataccggcggcaaagtgacggcaaaaatgttaatttgttgactgactcatggcttcgaataaggtcgttcatccagcgatcgatggcattcaaatcccaatggccattggaggatttcaaatatgggtgttgtttggttatggagatgattttacgttcaatttatatgactactcacgtggtatatcgggacagcttctcgagatgctgtgcgattgtgtgaaagttttcgcgagattctgagaaaaatggtaggtccaaagcacaggccatattgtttctgagggcaggtcaagacaatatctccaccagcacaatatgttcgtagcagcctatgttgctctggccgggtgctcttggttttcggtaaaagcctcggagggtcaccagcctcctgcagtttgatgaccgtatttaaacgaacggtcgttagtatgtccaaaggctggtcaaatttagcaatgtgttctggagtattacttagttaccgctcgtcgaggttgatattttctacttgctgttaaccgttgctcctgcgcaaaccgaccggcttattgttgagcattttgtgagatgtaaccgaaagattgtttatttgccaaattgtgagctcgttttttacacatgttgggtcctcatttcatggactttatagttgagacacgatatgttgaagtatgcaagtttgccatgttttttttctatctagtgtctgagatatttgggcattgcagcctacttttcgttatagatatgccaaaagtactatttatgggtcccaccagtgttggtttgatcaaatccagcaactcttgccatggccctcaggaaactaggacataaaaaaatcgggcccgcaaatcggtggttacggtgacacaagaaggatctttggattagccagggaaaactgttcgacaagcctgcctacagagttctattctggcttttctaccagttttatgccatggacggcgccgtcgctctgggtaacccgggagatattcactcctagaatagcaagaatacgcttctggaagaactctcctaccaaagacctatgactgagaggacggcaggtccgtgagaatgggtttttcccatggctctccctccattgacactctcatcgtatttctgctgacagtagcgccgaagactgaagttgtctatggacagagaggaaccattcaataacaagttctctggtccattccatgtttgagcatctgcaaattccattgtcttcaatattcatgtctagtttaacctcttttcatgcctccacgatcctcgaaacttatgctgtacgaatgcctcctctggaatcgatccgtcattcgtactgttagaatgtgactggcccatcccaaacccatcgattggcagtatcaggatatcccccacaagcctcggttccgtcaatccactcaagtcgcttaacgacgtaagatccggctcatcctgctgcaattgtcggaagacggcatctgtccaagcagatggcccagtcaatttcatgacttccgatgaactgacatggagctccgagaatgttgtttttcttgcggttgtgagtttttcagggtggtcatggacgcagaaagtgggcccccggggataaaggaagagagtttgtagttaaaactgatttcgaatatcactgtatacttcctgtcaacgtaagctgacaatctaatatatgtcgtcaattgtatatcagtccttccttccagtttaggtaggattagcacaagccgtcgcactgctaataccctggactagagatgggctcgttagctctgtccttggtcgctatcactagagaatgatgagcagtagacaacaggccgcggtgacaaagtctgccgttacagtaccgtattgcactcagagaacccgatcgccgtgaacacatcaattaaaatctccttctatgaactagctgagcccaagaagcttcgcaaataaaccttgacatgcccatggttgcgttccttggcgatggcatacgccgtctggccatttgaatctttcagtcgttttttcagaccacgctgattggccagcaactgtacaacctcataatgcccaccagccgcaccccaccagaatgatgttctcccttgctcgtccaccgtattcacatttatgttgggatgctccaataatattttggcaatctcaaatctaccttgagctgacgcaaacatgagcgcagtaaaggagcaagggccttggtcattgatcaacaaagattcctcgtagctgagaaggagaaggacaatgtcgacgtgctccatgattacagcgacctgaagtggcgacgtccccgatggtcttttttggttaatgttggctgaattttgcaagagaaattccaccattgaaaattgtcctgcgcgacatgctaaccagagcggcggaaatgcattggcagattgagggtttttatgaagccgcggctgttggaagaggactttggccaattctaaggagccatttgcagcagccattgccaaaggtgtctggcccagcttgtcggcgcaattgaggtccaggtttgtttgccgtaagaggagctcagccagttttatgtcggaattgttcactgcataccagattgcagtgcggccattctcatcttgataattaaggttgatacatggacttgaaagcaaggcttcaaggataagtagtcttttgttgatggggagaaaacaaccgtgtcctttaacagccagaagcaacggagtttcctgtcggtggttgagacagttgacatcaactcgcggatttcgtacaagcatttgtattactccatagtcgcctatttctgttgctaggtgcagtggtgttcggccatcatggtcgcagatgttgacatttgtccgctcatcagacaagaaaagttggaacatataggtttggcgacaggtcagcgcaattgaaatgggcgcgtctccgtccagggattgattattgagatcaatattctgtacattgaggagtcgttggacaatgttgacgcttccatgcagaacagcgatcgagaaggcactttctcccaaggtattacgctgtatgacttttactgaatgatggctcaagagcaaatcaacagcgtctgcgtactgcagctttgtagccaacatgagaggtgtaaggccagaaaatgtttggttgatatctgccttttcccaacccagaaagtgctggatgatgcctaactttctatgttcgattgcccaatgaagtggcggggtgtcttggaagtctatgcaatcaaagaggctctttctgaagatgacgagggatcctcgagatgcgagacacagacttcgaatgtccttcacctccatgaatttcacaatccacaaaagtgattctagtggaagtcccaaaagcagcatcttggcggatttcgtgaacgtatagttaacgaatacctatagagataataatgaaaggagggctcagagtaataattcagagataagtttgtcaccgccagcagttggctgaggagcttgggagacgcattcctttgaggcagtggcttcttaaatattttttgagggcgtatcatttatacggatttattcaagtggagtcaagtcaccggcttctaggatcgcgatacttactcctgggatcctgcgactggtttcctaggagccctaacgatcccgggatatgttacaatgctcccaggaagcactcacccattcctgggagttacgcatcgtatgggatatacatgaagcatacaagctaaattgagatatgatctgcgggtcccacatggtgcatatgggatcccctccagcgaaagcttccacgcgctacgtcgtgtatctagagtggactatagactttcttgatgttgattattcattcggaagacgctgtcctcagaaacacccggaatattgtggcttgacatcaaagttgacgatcttataccggtgaggccgacgtttacaccgcgggaacgtcagcaatgcataagccctcaaaaaatattttaaatagagaccattggccttgaaaattagtatctgacaattatcttatttcttctacgagtgataaatcgtctgaaaacccaaaaccgctcatgcctccacagagaagacatgtggcgtcgggccgcccgaacccataccccttaccaatcgtttatcaaggtcagtctgggattgaagtaccatgacggttccgaattaacctaactcaggcacgcaacatgcaaatcaaaggctcgagggaatcattacgagcatatacgcagaaatgtcaaaaatacaacagaaacactacgaggcaactgttatgctacaaaactgcgacaatatgttacgggcccacgcaatggacaaggccgacttggagaggcagaaccagtgttttattgaacatatcaagatagctcaacaaaaagcttgcaacctagagttcaagaataaggaactcgaataccaactggcaaaagtgagacagctgcaccccaaacaaccagaagggaggcagagttaaaaatttactgttgaagttacaaactttgcccagttaccaattgaatgacgccataattgatggccaaatgaacaggagctataatgcccatttctgtggattaggacatgcgaaggatcattttgttgcggcgaccgttctgaaacgagattatgtgaaaggtaggcagtgccttactttgccttagcccgcacgaaacagactaggaacagatggaggcaatgtattacctaaatcagggtcgtttcagagttttgtatcaacacaatgttgcaatttcagtgtgcgacaataaaaagcatgagattgccgaccaatgaatccctttgactctgtctccctagaattcgtgcaagaacaaaggggagttcaactgaccctatgcccggattgccagctacggtgcttgctagattagttctgtgttgtaggttccaacgccatgacaagaaaatggtttaagagttcaataagtctgttttatgctctttacttatcgctagtcattcctagacggcattgtccctcccaggaacctccgagtctcccgggagcctgatacaagctcctagaaaccgaataaatgctcccaggaacggcacgggtagtcccaggagtccctgagctcccgggaacttagaaagaggctcccgggagattcggtggttcctgggagcgcatgtcgctcacctgggagtgcataacgccatcctgggatgagcaagtttctacgtactcgggtcgaactcgtagatcgctcttaccgctttttcatttttgtccacaggctaaccatagaaattgcaatcccattctagacatgtgaccgaggatataggttggtttcgacagtgctatgaggttcgatttgggcagcattttctttagaaggctatcttatgctgacataccatccttaagaagttgggaggaatcgcagattacgtgagatagctagagattaaatacttagcagatcactcaggagctgtaatataatacaaaataaaacatacatggtacgttacattacactcagtaattacttactaatttttcttgtcgtatgtggcggtgcagattatgtaactgtaatgtaactgtctgtttccatgtaataagctggctgtattgggttttcaccagaacagccaacaagttgcttgcattgctagtcttcacggtctgtgtcctgttgcccactgcagttattttccggataggttcaatcaaatacgactagaaataaggactcgactatcatttaaagggctatccgcgggcccacctaaaaaggaagctcatcatgcttcaaacttgtgcgctgaaagtgtagggtgtttgcccctcgagttttaacgtacatcgcgtttactctttagaaaaagtgtccgccattctgcagaaatttgagccatttaatttctaactgatcccttatttttgcacagctaggaactttccgatggtgtgacaaggagtctagttaggtcggcgagggttggactgcgcggctgaatagcaaattttgtacagactgatgataaccaagcacaagtgaaatattattgattgaaaaaatgactcagttgctctttcaattggcccgagatctggtgcgtctctgagaaggcttcaattccatccatgcctgtcgcagtaacgccatatcaatatccgcgaaatgaggcccgatctgtctcagggtcagattctgtctctgtaggtcacgcaactttcgtttgttctttgcattaagcctctgtcgaggcttgcagctgttcnnnnnnnnnnnnnnnnnnnnnnnnnnnnnnnnnnnnnnnnnnnnnnnnnnnnnnnnnnnnnnnnnnnnnnnnnnnnnnnnnnnnnnnnnnnnnnnnnnnnnnnnnnnnnnnnnnnnnnnnnnnnnnnnnnnnnnnnnnnnnnnnnnnnnnnnnnnnnnnnnnnnnnnnnnnnnnnnnnnnnnnnnnnnnnnnnnnnnnnnnnnnnnnnnnnnnnnnnnnnnnnnnnnnnnnnnnnnnnnnnnnnnnnnnnnnnnnnnnnnnnnnnnnnnnnnnnnnnnnnnnnnnnnnnnnnnnnnnnnnnnnnnnnnnnnnnnnnnnnnnnnnnnnnnnnnnnnnnnnnnnnnnnnnnnnnnnnnnnnnnnnnnnnnnnnnnnnnnnnnnnnnnnnnnnnnnnnnnnnnnnnnnnnnnnnnnnnnnnnnnnnnnnnnnnnnnnnnnnnnnnnnnnnnnnnnnnnnnnnnnnnnnnnnnnnnnnnnnnnnnnnnnnnnnnnnnnnnnnnnnnnnnnnnnnnnnnnnnnnnnnnnnnnnnnnnnnnnnnnnnnnnnnnnnnnnnnnnnnnnnnnnnnnnnnnnnnnnnnnnnnnnnnnnnnnnnnnnnnnnnnnnnnnnnnnnnnnnnnnnnnnnnnnnnnnnnnnnnnnnnnnnnnnnnnnnnnnnnnnnnnnnnnnnnnnnnnnnnnnnnnnnnnnnnnnnnnnnnnnnnnnnnnnnnnnnnnnnnnnnnnnnnnnnnnnnnnnnnnnnnnnnnnnnnnnnnnnnnnnnnnnnnnnnnnnnnnnnnnnnnnnnnnnnnnnnnnnnnnnnnnnnnnnnnnnnnnnnnnnnnnnnnnnnnnnnnnnnnnnnnnnnnnnnnnnnnnnnnnnnnnnnnnnnnnnnnnnnnnnnnnnnnnnnnnnnnnnnnnnnnnnnnnnnnnnnnnnnnnnnnnnnnnnnnnnnnnnnnnnnnnnnnnnnnnnnnnnnnnnnnnnnnnnnnnnnnnnnnnnnnnnnnnnnnnnnnnnnnnnnnnnnnnnnnnnnnnnnnnnnnnnnnnnnnnnnnnnnnnnnnnnnnnnnnnnnnnnnnnnnnnnnnnnnnnnnnnnnnnnnnnnnnnnnnnnnnnnnnnnnnnnnnnnnnnnnnnnnnnnnnnnnnnnnnnnnnnnnnnnnnnnnnnnnnnnnnnnnnnnnnnnnnnnnnnnnnnnnnnnnnnnnnnnnnnnnnnnnnnnnnnnnnnnnnnnnnnnnnnnnnnnnnnnnnnnnnnnnnnnnnnnnnnnnnnnnnnnnnnnnnnnnnnnnnnnnnnnnnnnnnnnnnnnnnnnnnnnnnnnnnnnnnnnnnnnnnnnnnnnnnnnnnnnnnnnnnnnnnnnnnnnnnnnnnnnnnnnnnnnnnnnnnnnnnnnnnnnnnnnnnnnnnnnnnnnnnnnnnnnnnnnnnnnnnnnnnnnnnnnnnnnnnnnnnnnnnnnnnnnnnnnnnnnnnnnnnnnnnnnnnnnnnnnnnnnnnnnnnnnnnnnnnnnnnnnnnnnnnnnnnnnnnnnnnnnnnnnnnnnnnnnnnnnnnnnnnnnnnnnnnnnnnnnnnnnnnnnnnnnnnnnnnnnnnnnnnnnnnnnnnnnnnnnnnnnnnnnnnnnnnnnnnnnnnnnnnnnnnnnnnnnnnnnnnnnnnnnnnnnnnnnnnnnnnnnnnnnnnnnnnnnnnnnnnnnnnnnnnnnnnnnnnnnnnnnnnnnnnnnnnnnnnnnnnnnnnnnnnnnnnnnnnnnnnnnnnnnnnnnnnnnnnnnnnnnnnnnnnnnnnnnnnnnnnnnnnnnnnnnnnnnnnnnnnnnnnnnnnnnnnnnnnnnnnnnnnnnnnnnnnnnnnnnnnnnnnnnnnnnnnnnnnnnnnnnnnnnnnnnnnnnnnnnnnnnnnnnnnnnnnnnnnnnnnnnnnnnnnnnnnnnnnnnnnnnnnnnnnnnnnnnnnnnnnnnnnnnnnnnnnnnnnnnnnnnnnnnnnnnnnnnnnnnnnnnnnnnnnnnnnnnnnnnnnnnnnnnnnnnnnnnnnnnnnnnnnnnnnnnnnnnnnnnnnnnnnnnnnnnnnnnnnnnnnnnnnnnnnnnnnnnnnnnnnnnnnnnnnnnnnnnnnnnnnnnnnnnnnnnnnnnnnnnnnnnnnnnnnnnnnnnnnnnnnnnnnnnnnnnnnnnnnnnnnnnnnnnnnnnnnnnnnnnnnnnnnnnnnnnnnnnnnnnnnnnnnnnnnnnnnnnnnnnnnnnnnnnnnnnnnnnnnnnnnnnnnnnnnnnnnnnnnnnnnnnnnnnnnnnnnnnnnnnnnnnnnnnnnnnnnnnnnnnnnnnnnnnnnnnnnnnnnnnnnnnnnnnnnnnnnnnnnnnnnnnnnnnnnnnnnnnnnnnnnnnnnnnnnnnnnnnnnnnnnnnnnnnnnnnnnnnnnnnnnnnnnnnnnnnnnnnnnnnnnnnnnnnnnnnnnnnnnnnnnnnnnnnnnnnnnnnnnnnnnnnnnnnnnnnnnnnnnnnnnnnnnnnnnnnnnnnnnnnnnnnnnnnnnnnnnnnnnnnnnnnnnnnnnnnnnnnnnnnnnnnnnnnnnnnnnnnnnnnnnnnnnnnnnnnnnnnnnnnnnnnnnnnnnnnnnnnnnnnnnnnnnnnnnnnnnnnnnnnnnnnnnnnnnnnnnnnnnnnnnnnnnnnnnnnnnnnnnnnnnnnnnnnnnnnnnnnnnnnnnnnnnnnnnnnnnnnnnnnnnnnnnnnnnnnnnnnnnnnnnnnnnnnnnnnnnnnnnnnnnnntgttagtttatgatggtctcagggaggaagttacgaataaaccaaccatttttatttcctttcgatcgtctgggatgattttaatttttgtgaattgttcgaatccaccaaagaactgttcggcatgcgcactcacggttcttaccgtaggtagcccatcatcgttcagtcgcccttgagtagaatttgcgtaccagcgaatgtacgccttgatcatctcatgagttggagccggagaaccaagggaggtttggtaatattcaaacccattctccgggtctgtagtgaaactaaaggaaggtcagcagaatttataataggaaagggattgccacctcagatgcggcttaactcactcgagccagaggttcatagtttcttgatgtaatttgttggtcttggggagtcttctgtctttctcccgaattgagtcctcctctctatgggccccagggacataaccattcttttctcgttgtagacggcgcctctccatggcgattccatcgcgcttggcaaaaaagtcttttctgcccataatcaagtgcggtgcgacctggaggtaggggatgtatgcaaagtaaaagaatgcgatattagattaatgtaccaaagaaaaggcgctaggcgtgttggttattacatgctaatgctggcacacggtctgcctttataattgggactttgagctcgagccgctctgaattagaagacaaaaggaagacatcatgaaacggatgaagttctccgctctttcctgcgccccttcgtcataatgtattttcttgatgaggtgcagtgcttcggaaaatgagggcagtagcaatgctatcaacgaactaactatcacagtataaacgaccctgtgggggctaatctcttccgggtatagtctgaggtgggctgagtgcatcagtgttgctcactgattggacactgagcatcactgagtaatcagagagcatccaatgagcactcactgagcactcactgagcatcagtcatcctgcacgtgactgatatgagcatgatcactgatctgagcccgtgctgacatctactcagtgagcctgagcctgagcaccctcataaaagcggcggcagctcaaataggaaagccccacccgccagggaatatcctgtacgtatagtggcctatgtaacggattttccctggagggtggtgatttcctatttgggatgtcgccgctttagtaagggcgcaccactcagactcaggctctcggagtagatatcagcacgagctcagaagggatgaactcagtacagtcacgtgaatgatgactgatactatgtaaatgcccattggatgctcactgatcacttaccctctgtgtccaatcagggagcaattctgctcaccatatgagtggaacagccccatatttcccttttcttattgcagtggggttccagagtaagatgactaaaccgccatgtgattaagggcactcccgaggcggagatagcaacgcagacacctctccacctttccattctcagtagccatcccatggtgtttcctctctagcaccctactcccagtaacgactctgatctcacacctgtgtcgcaggcagggctgtctgtgcccctgtccctgtagcagggtcccctcttcaatatgaaggtgaatatattgttagaatgccttgcaaaccaatcaaacaggggaataagatatttgcacagcaaagcatgactatatctgggcatttacatggccatagtagccgtatttggggtatcgcagagatttttcactgccctgatatcagccctactggtgcaatggtgcttagtatgatcaaaaagcttgctacgatttctcagtaaaacccttggttgcaaagtggatgtaaaagccggtggaaaagaagttgaagacgcagggtattgctgagtagcaggtagtcgcaaatcaatcctaggaagcttttcaatcatactcagcactattgcaccagtagggctgatatcagattagcgaaaaagctctgcgatacttaagacggctactccatgtaaacgcccagatagtataaccatgctctgctagtgcaaatatcttataacccctgtttgattggtttacaaagcatttaacgatattaacctctattcctgtatattgacttggtactgtggtactatttccttcaaacatggcccattgagccagccgtatcctcctatttcaggcttgccaatcagccttttggatactgtggtcactgaagccaccgagaagagaaaagatttgtaagaatatctcatatctttatctaattgtgactaagctgctactacgaactctaatggcggtagtcatttacttgtaaaggcagaaggcagcgagtaaaacctgctttgtgatgattaagtccttcctagtagccctcgtaggcccctcgctagagctaagatacaaactcagtcgcttcagtattctaatcatgtgtcacccttgggtaaacgatccccggcgccttcttcatcttttctttagcaggtaatcgagcactcggaatgcgccgctatggatactttgcatgtccttctttctttctttaactctagactgatggaggcagataaaattgacatatgagctgcaccgaataagatttgcatcaataggaatgtataacattaaaaatagctctgaaatcattttcaatgcgcggctgctttcaaaatgatgacaagttgatactcgtgaatggcttcatgctgcagaacaaccctcgatccacaacagcacagatttcatcttctctttctcccaaggacgaaaagcaagccaactgttccattctcatcattaaaccccccggggtacttcggtccttcaagaatctcctgtggcattttcccgatctggtcgcaaatcagggtcaaggaaaaagctagtccatcacttttgctgacatactcaacgcccggttcaagagcattatgtgcaagatggacttgcagtatgacgtggcgagctcttgttggaaaccgtgattgctgatggcactaatttctgacagatgatgatggtagaggtccaataacagatccttggcattaagcaccgcatttgtttgctccttgtatccggatttgccagacattaggaggaggagtgttttctcggggagctggtcacgggcagaatagtattgagataagctgcgcttcatatcatcaaaatcgcgcttcctcgggttcccgactctctcatatatacttttttttactttcaaagacccgaagactttccccatttgctttcatcttgctctctattgacgctttattccatgggacgagtatgtcccatgggaagcaaatgtcgtccaactagttagaatacagacgaggaagccggtgctagagtaataagagactgtaagtaatacgtataagaaaatatgtcattgaacttgggtttaattgatgggttgattgagattcttatacctgttgcaaccttatcaagtgcgtgatatactactccgttgtccttttttgatgaataataggtgaggtttagagggatagagtgcacgtgctgaagctcacgtgtcgcattttattgatgtagcttactcagtcagatgatgcttaatcagcttatgtaatgatctccgatcggatcagaactgttcagaggcgtgctcaattttacctgagatcaaagagcggcaagaggtgagcactaaaatggaaagggaaaggcattatccggtacatatattgcacaacatatgtacatatcgatgggctacctgacccttacaggttatgcaaatgtactcatatcatatgatatgattatgaaccatgtacggagtactttgggccttgaagatctgcctaatgaaagtccgggtgctttgaagtatagacataatttttagtgctggacattttagatggctgagatttgtctgcagctgccaaatatagttaccgaaggctttggtttagctactgtcctgtttctcatatatattgaattattttggactatacaatgaacttggaattcgttaaattctggttctgatttgacaaaataaatactggggatgtctagaggaagtattgttgtaatggcctgcaaaaccgtgagagatatatattccgtcgggaaagggatgttgacatcaaaagcgcgtaaaacgtagaaatgaggtgtgatcatgaaaccaccagctccaaaaagaaattcaacgcatataaaaaacaaacaattcagaaaacctaccaaaatgaatcaacaagctagcagagttaccccggcctcatagtatactctctaacattgaagcatcacgggatgatatgattagataagaacctcttatagtctaaacccctttaggactagtccgtcaaggctctacagaacattttttttcctgtccggatcaactgcgaaaccaccagcctaaacccccatttgtttcctaaggggcggaagaaaatagagtctcatcggaatccttgctgtttttatttgggcctggtctattgatatctatcttcacaccaccgcaccctcgactgcgagaaaaaaaaagaagataagaaaaaaagttacagccaagatgggaaagaagacgactcgcccatccaccaaggtcgcctcggccgccacatcgccggcatcgggcatgacatatgcgggcagcaagtcgtcgatcctgcgcgctgcgttctcaccatcagagtaccaattggccctgtttgcgtccgttatccaaggcctcgatggccagcacattcgcattcacgacacacagacaggacgcctccagtgtgagcatgccctggggccgaaggaaacagtgacctctttggactggggatactacggtggctcaggcaagggtcgtgaccagtcgaaaaagaagcgcaagcgcggttccgatgtcaatggggctgttgatggcctggaccagggggacattgtggttgcattcggcacaaacacatcggatatccgtatgtactcgccatccgaagataaggttgttggcaccttgaccggcgcgcatgacaagggtatcaaggacttcaagttcacggccgatcgacccgcccaggaggcttggagtatcggtggtgacaataagcttgtccagtgggacctgcgcaccggacaaagcacacagtaagtttgggatacttgctgggtaacaccgagctcctaactaatatacccgtaggacaatccacctcccctcatcctcagtcttcactgctctctcccgccccgtgccctcgaaccctcctcttatctgcgcttcccagaccccgtacttaatagataccgagaaggccgatgagccggttcagttcccggccatgcgcaaccctatccacaccgtcatttcgtcctcttccgagtctgctggtgtcggtgcattccttgcatctgatggtgaccgcttcatcaacgtctttgatgtcgcttcccagaagcttgttcgtaaccttgtcgccgaccaggaggtctcgtcgattacactgcaaacagatggcgctaccaccccggagaagcaagtgcttgctgcagttaccgcagatggcagcatcgaactcttcacaaagccatttgttcagccccaaagtgcgccctccgcgagtgccaaggctagccggaaacagatgacccaaaaagcaaacgcaaccctcaaaatcaccaacaccgagtcttcgaacgcctgcgttcctgtcgcagccatatcattccagggccctaacctcgtggttgcatacaccgagggtggtgtgatccctgtctttgagcgtgtcaagttcctcgacgaaaagaccgatgagctctctttcaccggaaccaagaccgtggtgaagaccaagtcaggctcagcactttcgtctgtcacaacgaatggagtcaagagtgcaggcgagacccgggttgacgaatctcgcatgaatgtcgagcagggtaacctggtcgatgatgatgtagagatggaggattcacgacaagacgcatccgactctggcagcgaggaggactccgatgacgacgacaacaagaagtccaaggcttcgaccgagaaaaagaccaagcccaccaagcaagtcgcagcgaacgaggacgtcgagatgcagaacgcatccgactccgaagaggaagaggaagaagagggcgcggagccatcgttcggcgaacttctacgcgcaaacgcaggccaggaagtcgacgtcgaggccgagcttgacgacgacgtcctcctgggcgcattggttcccggcaagccccaggccgtagtgcaacagatccctaccggcgtttcgctcgcaactgtcctcacacagtcgctcaagaccaacgacaacggaatgctcgagtcttgtttccacaccggtgacacctccatcatccgcactaccatccagcgcctcgactcttcgctggctgcgaccctgcttcaaaaactcgctgagcgcctcgcctcccggcctggtcgctacggccaccttctcgtctgggtgcagtggacctgcgtcgctcatggcggcgccctggctggtcatcctgatctcttgaagcgcatgacttccctctacaaggtcatggaccagcgctctgctaccctgccctcccttctgctcctcaagggcaagcttgacatgctcgatgcgcaattgggactgcggcaatcgatccgcggtggcgatgaaggcatggatagcgaggacgaggacaatgtcatctacgtcgagggccaagatgacctcgaggacagtgagactgaggccaagacaccgcggaagtcaatacgcgaccaggcttacgatgaagacgagtcaatgatgaacggcgtcgacgagtccgaagatgacgaggacgatggaagcgacgatgaggatgacgacgaagagcctatcttggacattgaggctgctgagtctgtcggttcttccgacgccgaggaatcgctggaggagaacgaggacgaggacgaagatgaggatagtgatggctcgatggttgacttcattgccgacacggaagacgacgagtccgacgatgctgctcagcagcagcccccgccatcaaagaagagcaagtcttctgcttccatcggcaagaagagcaagggcggcaggaaataagcgtgtctcttttgaagttgtacgaattagagatgggagaatggggtaacggcctataaaagaacatattttttattttttcccttcgatgcatccaaccgggtctgcatgtcattttttctttctttgttttatcttttgctttcgatatcttgtgcctctaccgagcgcctctgcgtctccatcaatgtctattgaatttcaccttggtatcttgaatatcgcttcttgtaaggaggtatacgataacccgtacagagcacttttctacacataaacacggtatttataccagcaactcctcaccccggcagggacctgcatgcaggacccgatgtctcggcactccttcctcaccgaggggaatcagcatggctgtcgtccgctcccgcgagggataggtagtgaagtgacccaacgcactgacattagcagtgtcgagagctagaatgactccattcttgccaccttcaatccaggcctcggtggtcgaattggggagcgtgatgtgcgctagaccggagaggtagaccacccatctagtgcggcattagctgattgcggactctataaaaacaaacaaacaaataataaaaaacatgtacaaatagcacatgtaactcattcagagtcattaatttgaaatagcgaaacaaacgcatgagggagaatatcactcactgcaacgcaggcgcattatgtctaccaccatcaaacccagccggcaacaccgcaaacgatgcgttgccaccgacatcccccaaattcaaggcggcggtgccaacctgcccgggttgagcggaagtttgaaatcccggcacgagagcccagcactctaaggtggagcgatggtggcgtgcgccgagaacggtcacgttgagagattgggcgaggattgccgagggaaagatgaattggatgagggtttgaagacgcattttgaggaaattaggagtgaattgtgtgagctagatgtaattgggaggaaaggaaatataaataagaagaagaagatctgggagctgatatatagttatggggggagccaaaagttagttttgtcgtagtggtccgatccttcgcccatgggagccgaagagaactgaacggcggtggagtggaatcagcgctcgcctatgagcggattggttcctaaaataagctagcactaatacagagagggcaatatattggaggaatcgtgtgtatgacatcgatgagagtacatagctactgtaggacagtgacgtcggatcgaaattaatgttaaacatactacggagtatacttagcagattggacggcagaaaacaagaaacaattcaattcatcgcaacaaagaatgataaacctacccaagttctgtcttgcagcattaaaccataaaaatataagcgcttaatgatagtgagagtaccccgtactcagacccaagaagacaaagaatactaacgaatgacttcaccaccagacttctcaatgccctcgaggccttcaagaatgtcgcttccaccgaagagtccacaggcagagtcagtgcttgttcttcttccggtccagatctcatggaatttcacggtttgatcactagacgcgacaataatgcatccctcctcccttgttcgtgtgcaccacatcccaccttctttttccttgggagtgaccatgctagcaccaaccctgcggctactgaccttgcggccacgggtcggggtctcttgttctggagacccagtctgggttgacgaggacgaaggtgaagatgactggctgtcaggccgagcagagcgtgtagccgagaaacgagggatttttcctggatatcgtactgcccacagtgctcttccgcagtcgaagttgctaactcgagtctcagggccatcccaggtggttccatagggcccccagggaatgacggccacctgtgcgcagctgggccaggcaaagacggcgattcgaaatgggtgatctggctgtgcataaccaaaagtagcggcgatctcgcgtcgagtcccgctccatataagactggttacctgcgcgaagacattgatggttgcgagacaagctccgctccgggtgtgatagaagtgtatagctttgtcattggtgcctccccccgtcgcgagcagggatgactgccatggcgcaaatgcaattgccttgaccgcagcggagtgcatcagacgatacttgtgacgaccgtatgggaccagaatagttcgtcccccaccggagatcacagtgcctgcatggtttaaaagcgcagattcggccggaggcttgactggagcagcaagccatgatgggagagcaggtcgtctaagaaacaatcgtcttcttgcggtgctcagaggaaagtatggaaatacaccgaggctgaagctgctaggagaatccgggggcgtgatgggtgggaccatataactcatctgctgtggcgaaacaatctcagccagctcaaagagaaggcaggcgttgtcattaccacccgtggcaaggtatttgtcatcgggtgaccatgccagtccacagatttgttgagtgtgtgcacagatcttggcaagaagcgtcatggacccgttccaattccacttagcttgatcttcttcgtcagaccactcgactgaatagtaccagatatttccaaagtcgtcacctgcaacaatctcttccacgtcgacttccatatgcatgaaccgttctgaaggtcgccgtgatgttctcggcttaaacgtcacacatgtaatggtactgggatgactgatctcaaaccggacttccttctcgaatgtgctccatagagacaactgacctgaccgcctggccactgcaagaatgcttcgctcgccatcctcagaagaaaatgacaaggaggtgacataatttgaggggtgcagatctggaaaggggggataatccatcccatgaccttcagaccagagatatacttgatgacctagacccacagcaagtatcccggatgttgttgagtatgcaagagtgctgcagtaaaaatcgtcccgaaggaaaggagcatcaaggattcgaaaaggcttcggtggaacaacctcttttctggtaggagataagggccctgagaatcgatccgagtcagttgatgccttggagaaggctgcggataccgccagtctcacaattccaaaagttgggttaagaatatcatatatgttttatctgtaaatggtaaatgtattccaaaagtaggctcagggggtggctgttgatgactacaattgcacttacaacgctccttttcaatttgcttccaagcactgtccttccattcaaatggggagaggcgctcgaagtctggagatgctggattgaggggggcatccagataccgcagacaagtagtacctagctgtctggtcgtcgggtcgattcccaaagcaagggcaagcctcgactcatgtatttcttgttcactgtacttgggttttctgggtaaaaaccgagccacgaagactggggcagatgatccattggtcgaagtgctcggcgtttcatgaggagccacgacaagggaactatcgaggactgcagatgctccacccacgttccagactgcgccggagctgacctgtctcaaagattcatgcgtagtgttgttgcctgtgatattgccttcagtgactagacgaggccgttgatgtgggatctgctggagtcgagttggcagctggggtctgttggcaacataagccctacgtgggattgtgggcagaaatggatcatcaccgggaggaagtcgtcgaagtagtctctcttgaggcgaaagacgctgcggatgcttggccacacgaaaggttgttgatgttggttcctcgaagtctcgctttggaatgaatctatcaggcgacataggacttcgaaagaaacttcttgctactgcatttccagtggttctcactctgctgcgacctcttttgggtgaggagacccggttttctttggaacgagggacgggtgtcagagcatgttgggtcttgggctttgacaatgatgattgagaagtaggtgtttcaaaaaatggcaaattgatagttgcaaattcagttaattggacaggtccactgtctctggaagactcggatcgagagtgcgaagtcaatggatgtttgtgactgcctgtagaggtttcctcgaaggagtgacgttgcatatctaccatggttctggatgcaggtcgataagttgtatatgattaatgacctagagctaaaaaaggaatgtataaggaggcctctctttcaaggcatagcggcaagatgagaaagacgacgaagcaaaagacaagtccccaaagtagaaagagtgatgatcacgtgaagctatgcagatgccggggagcttacgtaatttacccaccgcatcatccatggatgcaccaatgagataattctagttggccacatctgatcaacacaaagcaacctacctacaaggaaacaccttctatttatttcttattgtcaaacaaagagtgaaaatgcccagtgtgagataattcccgcatgctgtaccgttccgaggctgacgattgcgatagcatggtgtgccgcggtacaaaccagctgagaagtccgccgaggcgcgacagcaagagctgcagaagatagaaaaatacaaggatctcgagatttctgtatccaaaaaggttggccaccttttagagctcacctataaatggagtctgacctaggacaggtggctgagcatgagtacacaatcgagaccttgaacaagatctcggagctgctgtctagcaatccagaatactacacagcctggaactaccgccgtctggtactacagtatcagttctcccaagcagggggctcggataatgagactgctacccattcaatcacacagctaattataaatgatttacatttcctgattccccttctccggagcttccccaagtgctactggatctggaattatcgtttgtggctgttggatgaagctcgccgtctactaccccttcccgaggcccgggaaatctggcagcaagaacttgcccttgtgggtaagatgttgactctcgatagccggaatttccacgggtggggttatcgacgcttcgtggttgagactttgaaggagcttggcactgccgaggaagcaacaagcatgacccagaaggaatttgaatatgccacgaagatgattggagccaatctttccaacttctccgcgtggcattaccggacaaagcttatccaatcccttttggatgagcaatctgccagcgatgacgatcggagaagaatgttggacgacggttggtctaacctgtcttatcagagactatcttatactgatttttgtttttagaactatccctcattcatcaagcattcattgatccttatgatcagtcactttggttttatcaccaaaatctgatgagtgtgtttgacccgtcgatggctgaacgaactatggcccccaatttgagctcgtccgaccggctggagtacattagaaatgagatcgaagagatccaggagatgttggatggggctgaagactgcaaatatatctaccaggcattaattgagtgcacccttctcgcatccaaggtcgaaggcagcttgtcttctgaggatcgggaccagattctgagctggctctcagaagtgaagaaactggatccattgcgacgagaaagatggcttgattttgagaagaccttgtgaaaatatatgaataggtaacctaagcctgcggccctgtcgtgtctttttatttgtctttttttccggtattgtagtaccagcgtgttgctatctgcatgattttctggtctatgactctacggatcggcgactatctgctgtctgcattgtttaattcatagttgttttacttcatagattatgccacttgatggattgtttgctaaatagctaagcgagatgtttcgaggcttacaatgtttgcaaaaggtcagctatatcaataggctgctttccactttgaatttgtttcttctttccttctttgcaagaccaagcggccatgtggtataaaagcaccctgaagcagatcttccaccttcttctcctctgatgcccatggtgttctcctctctctaacaccctgctactctcagtgaacgaatttgctcccaccgtgtttcgcaggcagggctgtcggtgcccctgctgcccccgttgcagtcccctcttcaggattttcttaacgttcaccctaaatatatactacctgaggccactaatgatgcatcaggactatttgtgtatagagtttctttatacttacaggggtaagtatcaaattcgtagcatatgagtttgcgggctaggagtcctcttacctatcagcaccctccgatcgacctttaagattgcgaaactctatgatagcatagagaacatcacgtttactttaagggtctttcaggtaaaaaagttcaatatcacaatagtagaccgagtccagaaggtcttctaacgatatacacttcggaagatcacttgcaaaggtttaagcccgtttgcgtttactaaggaatgagtggttgggtgagggggtttcttatagaagtaagataccggggcgacttccagtaaaagcagactatagctatactgtagcgaactggacaaccatacttccattacgaaaaaacctcgaatggacctagtggtgccggtagagcatacagaagacatctatatctagagtattcttatccttcgttcgtcgggggatcttgcgctcgaccggaaagggaccctctagaaactatgctatcattagccttatctcctctatacagaaggtatgatcatactcgtcgcatctgtttgtgggcgtccttattgacacggcggtgggcaaatagctcgaaatactgataaaggcgtcgccagtactcatcataagactacagcctttcaattttttaatcctttcttttattccggtgagaataataacatcatcgtcatcatcatcatctcgcgtttggttctacgaggtcaactaatgctcccgtggtcaccttgcaagtcatgtgatctcagcctactacctcaccgccgccttctctgcaatggtgcaaccaatgattatagcattaatattatatctatcttttttgatgtcttttgtacaactttttaaaggatccttatatgtacaattgcagaggtagatgtaactaaattgagaatgagaggccacttctgcaaacagtgcaaacaaacaaacaaacaagcaaacaaacgatcaacgatatgtggagtcacatgactgacaatcatgcagatcgtatcgaccagatatgtgtgtcactatttctatgtacagttgtcttggccagagaaaattagacggggatctacagggaagaccggccacccttgtacggtagtctctaactgctggtatgccatatcagattgaatttgacctgacaaacatgccatgcaagtacaagtagaacacagacctaagtcgccaattgtatccgttaagcagtgtttgctgcatatagcagacgtcgagtgtctaacaatacgaaatcacaatgggatatacagctatttgaatgtggagatggtgactcgttggggcaccaatcagcgacgagtgtacctggtcggtcgaatcgatcacttgaaactcaccaaaccccttcaactccttcctcgttccatctttttcctttttcgcgaattccacttgcgatttttgtcttttagctcttccgagcgtctgctctcttgcgatcctatggggtgttctattttctgattgttgtgaggtcatctaaacagctatggccgatatgtcgacacctaaacaaagtcccgaatacgaaggggtaagtggttcagattcagatctctccaaaaccccagcttgtcttgacacgagcttatcgcccttcgaataggagtcttttgacgacgcccttgaaaccgtctcaatccaggagaacaacaacctcaacgtcatcatccccaagtccacttccacccgatcgttgaccgatagtccggcaattggctcacatatgtctccggaattgacggagaaacctccgtcaccttctgaatcgcaggccgagcagaagagtgagaccgccgaggagcaaatcagggatggcgaggggctggatggacagaatgataagaacaataagaatatggggaaggggcaagatgaaggaacgggtactagcgatgagaataatctcgacaccaaccacggggtgaacacagcgaccgatgagcccacccggggtgataagccggaacaagggtccgaggttacgcagacagaggtcgagaagaacggagaagatcacgatcagagcccactgcagaagtcgcctctactcacgtcccgccgtttatcaacatcatcatcgctcgacgaagtgaacctgatgaacagcaaggaagacgagtcgacacacaaggcacagcgcccaggggaccaaacagaaccgcctccgttgcctcctaagaacgatcccgctcctccggcaagtgcaggcctgatgggtctgtcgggtggcctgccctcagtcccatgggcggctcctccagtgaacaagaatccgcctattccccagccagcccatcctcggaagcctagtggcccctttgcgtggttcactcgaagctcaaccgcgactaatgctaaggacatcaaatccccacccccctctgccagccgacgaaacactgccacctccgtatcgaccctcagcagcaacctagaccatctcgctcgtgatggcgacgacgtctccagtatcggctcaaagaagccgagacgcaatagcctgaaggatcaattcaagatgctacgcctacgcgaggagagccatgcgccagaggtcgatcagacgagcgtgcaatcgggccaagccagcgttagccagtctggagctagcccccctatcatcccagaggaaggagaggatggcattttggtagcgtcaggagtcgtttcaccttcgaggacggtcggtcctgggagaacgggctctgtggctgatgcttccatccccgtggactgggagatgtggcagcaccttgtgaacaacgggcccaaggccttggcaagctcagaggaactgaatgccgccattaaacgaggtatcccgcagacgatccgaggagtgatttggcaaattttggcagattgccatactggcgatatggaggatatctatcgagacctcgtggcgcgtggcacagcacaagacaaagatggacgaacaataaatggcactgaaagttcgtcatcacgctcttcagtccgctcccacccctcgggttccggctcacggtccagcagcgctgcccctagcccgcctaacgaaggagaaacagataaattgtgcaaggaacatacctccaatgacgccgaccgtcttaagaaagcaaagatagacgccgttgcgctgcagaaattggagaagaccataaggcgagacctgggagctcgtactagctacgcgaaatactttgtttcccaaggcagccaagaaggcctctttgggctgtgcaaggcatacgccctgtatgatccgggagttggatacgcgcaaggcatgaattttattgtcatgccattgttattcaacgtgagtataccctcaattaggttgactgagcttatgggctgacgttttacacagatggacgaagtcgatgctttcgccatgatggtcaagctgatgaacaagtactctctgcgagatatgttcattcaggatatgcctgggcttcaccgtagcctataccaattcgagcgactgctagaagacctagaacctgctctctactgccatctccggcgccgtggagttcctcctcagctgtacgccacccagtggttcttgacgctgttcgcctaccgtttcccgctgcaactggtccttcgtatctacgacctgatattcgaagagggactagaaaccaccatcctcaaattcggcgttgcgatcatgcgacgaaacgcagacgcgctgcttgaaatgaaagatatgagtatgctcactactttcttgaaagagcgtttgttcgatgcctacattgacaagcagccatccacctcgtcaatcctagagtcgggcttcttcggaagctctggtgcctctgataaagagatttaccgatccgacatcatggtacaggacgcttgcgccattcctctcacgtccgagatgctcaccgcgtacaccgccgaatgggaggaaaagaccaaaaccgagaaagagcgtgaagtcgagctggagcacttgcggcacaccgtgatcacgcagggcgcacgtgtccgacttctcgaggaacgtgccgaagcatcagacaaggagcatgtgcaattggcttccgagctggtgcacgtgaaggtcgagaatgaggagctgcgcgacctcaaggatgcgctggaactccaggtcggccaacttaagaacgtggtcgacaagcagccggctgaagtggaggagaagctccgcgcagaaatggagcggatcatgaagcggaacatcgaggtgcaaaacgagaaccgtgcgatggaagaatcaatgtccgatatggagaaggagttggttgccacgaaaatgaagtgggcagaggtaagatattttatcattcagcgtgagatgccgagactgacgagctcaaacagatttccgaaaatcacgagaatctccgccagaaatggagcgacctgcgtcgtgccctcgactgattgtcacaacgttgcttctattagtactccacccggatagcaatattcggttctgtatatttggaatgcgcagatgtggtagcgaggatctgcgatcacgtcctatcctgcgcatttgcaccatgcttatgggccgggtcaattacttttgtcctgatttgctccctgtacctgcttttctccgttttgagccgacatcatgatttgcccctttacgactcttttctccaagctctcagcatgccatttttggaaggcatcggtgtttcgctaccttgtgttgaattatatttgctctagtgtgtatgtctatctccgatcctcgggcagggcgtactagacgtatgcatgtacatcatcaatggactttgttcatcctattatctagcttccgcatgtggccagctctctaccttagctctatactctctttatacgaagatcgaacatgcacaaatccatctctcgattctgactccattacagaatattctcatagtaactcgtcaacacatcctccttgacaggcgccgcacaagccttgagagccttgtgcgcctcacactcggtatcataatacttcatatcctccatcgaagcaaaagtcgtcttgacagacaagttgtaccccttattacgaggatcagggatcgaagcgccaacagcagcagcgaggatgtagggtttgccgtcctacaaacagaaaaagaaaacacccgttaataaccgttcaattgcgtttcattccgaatctcccgaatgacgactacgtggtacagcaagcatagtacagcatagtacatgtagccaaacagcgcagacaatgtagaaaagaacaagatgcactcacctttgtagcggtcttcgcgaggaccttgtactgctccagcacgcggtcgcgatccgcctcgttggggatcttgaagagggtgattcgctcgataggggccattgtttttttgagggtgtgggaggtgaggagtcgggaaatggacatggatttcagattctgggggaattaatatgaatttatacgggtttatatggcggggttacgatgggttcatatatgtcattgtttctgatacttccgtcgggttgtggggaggagccggagtagatccgttgattcatggtttgttaattatttccgctatttttgactaggttggtattgtttttgattgttttgtatcttctgtatattctagatgtctctctcttcaattgagagtttctttgctggggaaatagggcggaatattcttggttggagagcgcgcaatttccgctcgggtatttggtgtgcggaattggatattgaaggatgatgggattgtatttgtatatgcgtatcggatggatattgaggggcctcggtatattatttgtacaccattgccatgctgtggaacaaactacgcaagacatctgtatggcttactatatggcgcactagaggcatagggcatcgaccgaggaacttattagcttcactttataatacccggaagattgactagagtcctagattggatatgacatggtccatcgtatcaaacattcgctgggcactggtcacagattcccacgcaaagcctgttccctttcaaaggcctcgaacaaactcttgaaattcccagccccaaacccatcaaaggaattccgttgtatgacctctatgaacaccgtcggcctatccccgacatgcttggagaagatctgaagcaggtacccgcgctcgtcgaaatcaaccaagatattcagctgctcgagtacgtctacatcggccccaagcgtccaggacacttgtgtcaggcgcttccgcaaatccgcgtagtatgtagctggtacactgaggaactggacaccgcgcgcttggagactagttacggcagcgacgatgtcgtgcgtgcggaaggctatgtgttggactccggcgccgtggtagtagtcgacgaatctgcgaatgttagaagtgctggtatgtgggtggcgtagggcagacgagaaagaagaaagaaaaaaaaacagggacaagttgcgtactcttcaatctgtgatttcttcttgccggttgcgggctcgttcataggcatcttgatggtttcgtttggtgaagcgatgacaattgatcgcatcgctgagtactcgctgcacatgtctttatcgtcgacggtccagtagcgatggaagtcgaggcattcctcataactaaagctggttagcgacagtcaaacaagaaccacattaattctactcactattggacaatgctgtccactcctccccacgactgattcccgacacagtggtcaatctcaagaaggttgatgggtggcaaaagctgtgtgatcggatcttcgctatcgagcaatcgatacccaggcaagaagggagcacctgccgaatacctctcccgattcaccagagtatgtacggtatccccgtacgtcccaacagtcgcagagacgatcgatccatgcccctcgacagaaaacgtccgcggctcagtgatagcgcgagcaccgttccctatagcccggttccatacagcttgtatatctcctgcgatccggaatgcgacatccttcaccccgtcgccgtgtatggtcaagtgcttatggatctcagccagcatcgcccgctcataaatcgaagcctggcgcaagataccgtcttccgggtcttggttcggtgggccacaaactggccccgtaagaacaaaagtagcgtcgctgttggctacaacatagctcacaaggtagggcgagccgttttctgggccgcggtatgcaacggggcggaagcccatgcgagtaatccagtatgtggcagcttgtttggggttgccgacgtaccaatggatgtgatcgaagccgacatattcggggcccatcttggcgggaaagatgtcttcattttccgggacggtcatgatcggtgctgttgattgtggctgcgctaatatcggtgcaggtgtggaccgagaaacatgtcatccctacgccagccgttgagccggtgtaaggcggggacaagttatttatgagtgattttgaaaacagctgggtcggtgttgaggagaaaaatagaattctggcgaggaaatccctgcccagacgtgtcacattccaagcccgcgtctccggatcgagaggctatctaagataaacgtatgaggcaatgctgaagtcatccattaccagagctttgtccttctttggtgaaccttggggggttcaagttcaggcttgtatacccacagaagccgaagtgatgtttttgcacaaggtcaatgctgtagaaagaagccgctgttctccgtagcaaagcgcgaggccatgtcagttgggctggctgtgcatgtcgcaaccctttcatccaagtcctgcggctgtatgtgttgtacacaacatatgccatttccagatcccatctcgctagtttatctcattccaaggcgaaagtaaaatccccaaatcagcccaatcaaacagttgtcacgggctccggccgactcttgaagaaaatcttataccgcacaatctccacaacctccagttcctcgctctccgccgcctgtcgtctctgtagcacggcaatcggccgcggcagcttcttgacttcgccagtcatccgctggtaccgaccgacatacatgtaagcgcgcttcatccattttgtgtcatctgggttgtgaaccgaatagtctgggaacatgagttttccgatcggagtttcgaaggtggaggctggattatccgtagaggtagagtagtctatgtcatcttcgtcccccgaggggacattgattgtgccctgtagttcgagaagggctaggcccgagggtgtttgaaggagtgctggaaggggattattcggtgttgaggcagtcgtagtcctttttgctgagccagagcaacgtggttgtagctttatggagggcataatgtagtcttgatgtttcaattggagttgaaggaggaaaacgcgaacgcggcacgcgtttgggatttccccacttcttatcgcgagaaatgggtaattatgggattacaagcacggaatataactatgatcacatatattatttgtaatactgatgcttgggataagagtacgtacatgacttgagtacatcaataactagaccattgtgtttgttctcatgtcatatcaggtaaacgcatagtctttgtctaaagcccgtccaggaatcaagagttatatcgtagtagaagtaacaatgaggtagctttgctacaaatcttgggcttaagtgtggctccaaactaatcgacaggagctttagtgtaatataagcattcttccgaggccatggccaagatttcgacatgtaaataagagtggaatgtaatagatggcctttcaagagaacaattttcgtgtgattgccacgaagcgcaattagctcgaccctataacatagctctggaggcagaaagtggtgaaatacaggaagcgttcagcaaacatagagcttgatacctgtatgaactgccagacaactctcggaattaggattcagacaggaaagcgcccgtggtattttgcattgtatctgtatatgatttatattagtcgaggtatttttattgacattgagaccataccaacagttcaggggtattcaaataacaaatgggcacaatacacaatgcataatgagcagaagcatacctctcaagaagcgctattcttatagcaaacatcctcaaggttctgcaggcccttaatagcctccccagatatatcttcggcagtcctaggaccctgtaatttgccgtaacggagatcgctcatatcaccaacagtcgtattgagctgagctaaaatctttgcagcctcttgatcgatcccagcaatttcacgctcgacattagcgctggccgtctccatttcagccaggagactagctactgagtgataatttcccggtacagcagtaggtggttggccaaacagatgaacatccatgtccatttcacgctcttcggaacttgaggcttcgactccagtggctagaatggcttttcggagctccgctctttgcgtttcaccttgcttgatctcgttgtcgatgttttcattgactcgatccatgtcctgttctcggacctgttgcagctcccgatacaaagtcctgatgtgtggatgggatctcaagcgctttgggaagagctctgtgaacttttgcagcgagatgactgttggtagcggggctggagagagcaggaaattgctcaggatggactcctcagagggaggcatgatgaatgtgtatagtgtagtacacacaatatgcagagtatagtgttctcttcttctcacaactgtggtgtagttttgtctcccgtttgacgcgaaccggaagttgaaaatattcacgtgaacaaaagaatatgaaaatgaatagaagaatggaaatctattcctattgttatggaatagtggaataaacagacgaatagacgaatcgttgtcaatgtcaaggtgacaataagctgccgcgcttaatttcttccaaggggccactcctcttcgcttgttttccttcttcttcttccactctacttcgtctacctcgtctacatctacatcaacttgcctcaaccccattctctcttcctaaaatcttgactctctctactattcctgagctggtctcgagtctgatctattcttgttccttcttacaccttcttctactttgctgaatcggatttgctgtcaagaacaacttgtactgccatttgtgcatcttcctttcttcctgtttttgctcaagtctgcatctagctgcggtgttccaattgaagtctctgaaggcttccaaggattttctgatcgtggctgttaccgcctgtatcatacctttccctgcgagacaggaatcatcttgacatctctacacctttgagctcaaaggtctacaatctgtcatacaagcttcgacaagcacgtcttctacctttctctgacaaaatggctcctatttctatgtatagcaaagacgagaaggtcctttgcttccaccatgagatcctttacgatgccaagatcctggatgttcgccacaaggactccactgacaaaaagagcccctttgaatatcaagtccactacaagggctggaagaatacgtaagtctggcttgtttcatttcttcccctgtttatctacgtcctggcggtgtcaagatcgttcccctccaaaaccttggaaagtttgtccgggccaatacggaagacttgaactcgactttgagctatgcacactctctgttatgcagaattgcgtcttgttttctgccgcacatgtttcagaaaagaatatatccatcattcgatttcgtggaacattctaacattggaacagctgggatgactgggtcctggaggaccgtcttcgcaagcacaccgaagacaaccgcgaattggccagcaatctgcgtcgggaagctgaagcttcattccgtctaaagaacaccaagatcactgctaagaagcgtgcgggttccgaccgtgactctgtgcgggacagcgaggagcgcggctccgtgcccagccgtggcaccaagcgagcccgtgatagtgaaatcgaaaaggtatgcaattaacacatcaaatcgggtgcaatggaaccaaacccaagaaaataaaatacaaaaggaccgtattatttatgatcccatactaacaatcttcaggaggagagcttcaatatccgcccctctgtgcgcgtcgtcatgccagacaatttgaagtccctacttgtcgatgactgggagcaggtaaccaagaaccagtgcgtcgtctctttgccggcgaagtacccagtccgccagatcctgcaagactggcacgaggaagagctcccaaagcggtcgggctcgtcggcagacgaggacgtgctggaggaagtggtcgccgggatccaggagtacttcgacaagtgtctggataagattcttctctaccgccacgagcgcccccagtaccgtggcctgcgtaagaagttcgaggccgctaccggggaactggccgataagggccccatcgatgtatacggggcggagcacctgatccgcttgttcagtatgtactcaccttacttctgcttcaactgtgagagttgggaatcgtactaaccgttgcgtgtgtaggcactatgcctgagttgattgctcagaccaacatggacatgcaggctacgaatcgcctgcgagaggagatctcgaagctgtccatgtggttgagcaagaactccgagaagtacttcgctaccagctaccagccggcggagagcactcactgagtgcgagaagaagcttctcttgggggaggaaaggggcttctgccccttttctgtgttgtatgcgttggggtgagggtggccacccttccagcagcagcttgtttttttttttaagattttcgaagaagcgcgggcctgaatagacctggaatacaagagactttgcttagctatatcttaatctccaagaagacgtaggttctcatgagattggagttacgatctgtactagtagttgtgagatcaaaccctgacatcttgatgctactactcggtagttattacagaagcaaggcaataatgagtcgatgctgagataagagaaaatatgaattttcaactggatttcttaatagaaaactcaatgataccactacctagtgatctatcaccgacaaaactcttgaattcagatcaacatccaagatccacaaaattagaaggagaaggaaatgaacaatccaacaatctaatctgatatctaagcaaccagttgccttgcatcatcaacagcccaccgcgccgcacgcttcaattcactcttccactccgcctcacgccacttaacccaagcattcaaaccctcaggcggctggatactcagcgtatcatagccctgcttaattatacggtggacctcacgcggggagagattcttcttcctgatcgacagcaacgccaccggcacaggctcatcgcctttgggactggcagccgccgccgccgccgccgcagcagcagcaacagcagcggagtctgcaccctccgaatggaagagcagggtgtagaaatgcgtagatactgagaggagggtgtcgatggctgctgaatgcagctcgttgggttgagagattgcatcggctgcgattgcggtattggagcgggacagtgagtatgcatcgcggaatttggagataatggggcctgtctcgacaagcttatagaagaggtcatcgtaggaggctgggtctgggaggaaggtgtcgccgcctgagacgcagaacgcgattaggtctgcgagggaggttgtgagggtttggattttggggctgctggttaaatcggaggcgtaggttgttaggaagcgcatgagggagagcagagtccgccagagctcggaccagtggtaggcgaggcggatcttgttctttgagaggtaggttaggaggtggagagtgattgcgattgtgtggctgggaggcttgttaggaatggctaatggatacagtggatggttgtttcgtacctgtaaatgttgacgtcgaggcgccggcgaaggttatgcgtaatagtatcgatggcaatatcaaatatgacggttgcgaggacccgctctccgctgactagagggagatagggctgtttctgtcgacagatgcgtacctttcgcttgacttcctcgctgcaaatttgcttgcagatgatcgggtcttcgaccagaatgcgaagtgtgaataggtttagttcggcatagtgcccgacccgcggggatcgatatgcatgttgaagaagataggaggacaatgataggaagctcgaaaaaggggcttctccatcgctggtttctggtcccagatgaaccaaatgataaccaaagagcttattggcgtttgtgaagtcgtacgtggccattagaattgcggcttcatgtgccggactgccaggattgtaagtttcgaatcaagattctccgtgcagagaacttacagatcagcgaacatggccttcgcttcttccgccgaaggtgggttcgctctatccctggcgcccggtgcgagcgctcgtagtccaaaaaagattaacgtgttggtgaagctccagccctctggaatatcatcctggacagcaatatagccattccgcaggcgattacaggccagaccgacacccttggcaactttttcaatgcttgactcgttcacaaaatcatcaagccgaagctggtaggggttttggaattcaaacttgttgtagttggccaatagccccagaaggaggaatggatcgaacacttgcagcggggtatcagaatcagaaacatactattagcgactgtcagttattttcatatataaacaatatgagtaactcaaaccttcatgagcgacgggaaaaggtccctgtgtgtaagataggagaccaggctagttttgtatgctccactagtcatggcaatggccgtcttgatagctttgagccgcacatcgactggaaaaattaggatcaactgatatgatctcggttaagagcagaacaagcaatgacttacagctactgccattgcgaatgattctgtccaaaacggccacgaactcggaaatgacatggtccacttcgtcgagtcctgcaagaacagtgatgacatccgaacttgggtttgtgtatttcttgctcaaaatgctcgtcaagaaaacagtcaaggtctgtgaaacaaggttagacaatatgtgccggatattgatcacggggttcttacatctaatgcataagaatccgacggggcaaccccagctgctgcctcgcgagtggcacggacaaagaaacgccgagtttgaatctaggggttgtatcagctatttgattattgtcttgggcgctttttgtatcatggcttacctgtagaccaatagtatcgtctgggctcaaatggtctaggatagcatgtagttgtttccggtctggaggcagcaagaaaaattctctccaaaagccctccgaggggtctgcatcatctgctacctattaggagtattgttagcaatatttcataaagcgatgttcatacccgtactttgaagagattctcatagagctggacaatcttaggtttaaaggactcgggtctactctgctgggtaaggggtgaggcgtccatgatattagacaggatgatctgcaacgttaggtcgccagcattggacctcgagaaccaaaagagtaaggttaatataaagtcgagttgattccaattgcttcgaggttcataaaaagggacaccagccactttgtcagccgatccagccacatgtcctctacacttggcaatgtgtttacgcattgggagaaaatgaacaaattccagtatattcgtgaattaacctagtggatctatacagttcataaactttacatcttgatccttttccccgctactcagctacatttagaggtgtgggtggcatcttcatgagagagccatgtctctccgaggaacggaatgctccgcggtgtgggatgactcagcttccgaaaaacgcattggatgacaacattggaaatccaaagcagatcgcagttggaacttgtcattctaccttggtagctggattaaatagggcaaagacgaatcagctcggctcctaagtcagcctcttctcctgattagtctataattagcaaatcaactgaaactcgagcaatggcgccactgctgcactgctgttgtgtagaaaccactcgacgctgattggctgggtttgcgtcatgcaacgatcttatgtaatccacttgccatgggggaatcctcaaaacagtcagagattcttctcaactttattactcaatcctccattccaccatttttctcacacaacatcctatgatccaatagcaatttcgtcgaggttcactcccattttacattgattgcccctcgactatgagcttctctaccaccatgcaacgtccagtgacatcatccgccacactcctccgatgggtaaagccctcggcaggacgtctgcgtactttctcctcatatggaaacgcttacctagcctccaagcgggatatgcaaaccgcaactgcctaccgtcctcactcgctcccctcctcattcccgcctcctcgaagcaccggcggcgccgacacttccatttcagctgaattcccttccgacatgaaatcataccgcaacacatcacaaggcacattgtccaatgtgagcctacgggaaggcgaggcgcaaaaatccaagccgacttccgcttctccgcccgcctccaagacttccccgaaaccccgtcggccgctccggccaagaaaggccgccatgaaattgtccacattggccatcgagcagcttcgcaagttgatggcacagccggagcccaagtatattcgagtcggtgtcaagaaccgtggctgctcgggtctcgcctatcacctggagtacgtggagaagccgggaaagttcgatgaggtagtcgagcaggacggcgtcaaggtcctcatcgacagcaaggctttgttcagtattatcggcagcgaaatggactggcaagaggacaagctgagcagacgattcattttccgcaaccccaacatcagtaagtggcccctgcaagaattacagcatcctctatagattcgatttactgactcacgattacagaggaagaatgtggctgcggcgagtctttcatggtttaagcacacggcttgatcattccttttgatatgtttcttatacaggacctcttggcgtctttcttctcggtgcatcggacggcgttttcaaagggggtctgggattccacgaccaccctcttgtttgagtatatacgcttgatatccagttgataccttttatccactttctttctgcattttctactgcgtctcgtggtcactgtgggctcacaagtggcgagccatgtcaagagacaggctagaggctcaaccaacgaggtgctggcttttctttctctgcggagacattcttttgaaccctcgcaagatcaaccatgtgatatatttgtgtatagattagtccgaaggacattgatgacgacatatgacatatatttagctcaaaaaaatcaaaaaaatcaccataaacatgttttctcgataatctattcttttctccttcctattagcttcctattagcctctcagtatagtagaaaagtcatagtatacggttactgtctagaatgcgtcacctgactggatataagccgaggccccggaatgggctgagcgccgcatctcatacataccagtcattgcttgtatagagcggtctcaatccattccacatgagagcataggattaactgttacctaaaacatgacctcacccttcctctctccatacgcagtcggcgaaccagacaccgagccgctcctcatcaccgtccgcttctccgcctcaatccccgacctccaactagacgtcccagagcccgagaccacaacaggcgcaggtctaaagcaactaatccgagcgcaactcgccaaacccctgtcatcccaccgactacgcctcatctacgccggccgcggtctcgaagacacagccgcattaacagcctcactaaagctcccttcgtcaccaagccggagccctcgccccgtagcagaccaacccgagacaccagaagaaaatggcaaaggaaagcaggcggtgcgcgatacccgcccacgaatttacatccactgctcgatcggcgacatcgtactctcagacgcagacttagctagcgaagcaagcgtgtcatcaacgatccttctgcaacagaagcaacagaaaactaacacaggaaagaaacttttcggcaaggatgtctcgacatctcgtcactcccagacccagacccagacccagacccagtcccagtcaactaccaccacacccgcaccccgcggtttcgaccgcctcctctcggccggcttcacggcggctgaggtcaccgctctgcgctcccagttcctggccatgcagtctgtttcccggacgccggatactatgcctactggcgaccagctgcgggatcttgaggaccgctggatggatgaggggtcgacggcggcgcaggtgcagggtgggtttggggaggggggtggtatcggggatgacgagggcgggattggatctggatcgcgtggggcgatggatgatatgctttggggcgctgttatggggttcttttggcctgttggttgtgcgatgtggttgcgcagagaggaaggggtgtggagttggaggaagggggtggctgtttgtgtgggtgttattgttaatgctgtttttggggcgatgaggattatgaactgagggtgttgatatgtatatgtatatatcattctttcttcttatttggcgttatgagatacccccaattgaagccatttggtacattctaattgatacgtgagatttgtctaggctattaatcattgtattagagaccgggattgcttggactaaggatttgggtctagctgtgtaaagactcgccgatgctatcatactgtatacataatggcaaatatatgagagacagagacggacagacagacaggcaatagccttgctagtaagagcaggaaataaaaggatatgagagatcagaccgagtatacaaacgccagcgcgaaactcaagtactaatggaacttgctgaaaatgacagcgaaaatcaaaagaaccagaaccgtaataatcgcaatagtgatcatccgattggtagccatcctaaacaacacacaagaggtcagcaatcacgtctatatatagaagaacaagacaaaaggggagtcagtacctacgggccatgcccctcaaagtcttgatactagtatcaacgtaaccctcactctgctgcaagttgttccgagcattcgtgatctgctccctctgctcgtacagtgtgccgagcgtgccgcgagcaacatcctcggtctccagggccatgcgctgactctgctgcagccgtgccgaactgcgctctagccggtccgtaccggacagcaactgctgtctttgttcgaggtgctcatcctgcggctcgtcggtgtatcggtcgccgaatagtgcttgccggtcatccgagagggacttgagcttgcgcttgacctcgtcgatatcggttgagtagttgcggaagcggatgttgacttttgaccgggctgcggaggggatgttctgcttctccatgcgcatttggtcgagctagatggggtttgatcgggttagtttgttctgttcttgtgtttgttcgttgttctcgcattgcggcgcatgaaaaccgggtgaggggttcggtggactcaccagttctgttgcttcttcgaggacttgcgttgcgttgccgattgctgatttccgttgctcgccgcttgcctcggcgatctggtccagcttctggttcagatcggcttgcaccagcttcaactcgttctcgtagctggcgaacatctccgagccggcatctgtgttcaggtttgacatcgtgattgtatagtatgtattctagcttaggtgggagagaagatctgctgtctgcaacggtagttgatgtgttgatgtaggctccacctttatctggggcgggtgacactgttcaacagctgagtggcggtcaacggatcttgttagtgtggcttcgctttgcaaccgatatagactgtttttttgggagttcttagggagcacaaagagaaaatatcgaaataaccaaaggtgctaggataagactggaacgtgacggtgagacacgtgattaatctaagtcgggttgcatttgcgacatgcagatgacatctatataactagtactctatttaaacctacaaccatttatcttttagatgctgcaataaaccggaaacataatttgatacatagcattagagtaacaccaggcccatacaaaacaattcgccttttcaataaacatcaaagatacccctttggtatacaagatcatggaactttctcaagccttctagccatttataacaggaaattcttgctatcttgatcaacaatgattgcgctacgcttggcatccaggaagagatcctcgcactccgcaatatcagcctcctcaattgcgccggggcggccattgacacgcgagagaatgcttgcgggggtcaacagctgcagggcataccgcaagctgaccttgcttccatggtcagcgaccttgttcaaggcaggctctgtgatattgaggccttcaatcttggcgcgcagccggatgatagtcttgatctcctcgggggcgtaggggttggtggggatgataagaaggcgggcaagcagatcaggtgggataccgtgtgcggcactgatttcagtaccgcgaataacggcgtggccacggttggaggcgaggatgacaatcggggagatggtcgattcgagggcgcggttcagatatgtgaagcactcaatgtcgagcatgtgcacctagacgaagaaacgaagtcagagacatgatccaataattgacagcataaactttctccacgtacctcatcgatgaagagaacaccgggaaccaactctgcgacaccctgatcaatgtacctgttgacaaccttgttgatttcctggcgcaacttgtccgtgatttccgtcttcttgggcttcatcagctggcccatcatactcatcacgtcttgtccgccctggggtcgggcgttggccatatccaggtcgtgaagggtcacatcctgaacaatctccttcttcttgtgaacctcacccttggggacaggcacatactcctcagcctcaagatcgaattcggtagcataggcatcggatcgcccgactcgcttgcatgagccggtgttggcttcaatgtagatgacatctccgactgtgacacgctctttctggatggcttcgtagatgctggggtccaggcgcagcttcttggagcccttagcggacttcaatccgatgatcaggtggctaattgtgcgcccgtatccgcccagtgggttctcagcctcctcgggggtaagctctgtcacctctccctcataaacttcctttgtttcgcgaacacggaggcctgtcatgcgttagcttaattttctagcttgtggcgtttttccctgatgtcgtattgcgtaccaatagctctccggaagttctccatcagtgcttcagtcttcttgacctcagcggaatagatttcactgccaacaatagggcagaaaggaaccttagttcctagctcctgcgatacagcaagagcaagagcagtttttccggtaccagggccaccagcaagcagcacagctcgtccagccatcttctttgacttgatcaagtccaccacaacaccgcatgcctgccgatggtttaaaccgttagttatcgttactgcgaaccagataccctggattcagtgttgctatccactcacctcacgggcagctccttgtcccacgaatccatccgcattgagctccggggtcccatcagagcgtaagcctagaccccgaatgtgtgtatgcgctgcggttctgttctcgcgcgagttccccttcacttcactaatctggaccatgtttgggagagatgtggccgagtagagccacgggtattgacgagagatgggtcaatcggttgaaaagaaggaagtagtaataaatcaaagcttcaaagaaatagcctagatcgaaaagaaaggtaacgcgatggttctctgtgagataatgcttctggccgaaattcgcgagcaagggatcggcgaatgagaacgccgccctcaaggcggtgaactgccccaaattcttccctactggacctcttcctccgcctgttgtctactaacgactttccggctttttgtgttctcgacactctgcgagggtccaatagctgtcaaacacaatggcaggcctacacgcaagatccgcaatggccgcccccttctctttggcctcggccttccgcagtctttccatcgccacaccgaagcgatccttctcaacgacgccggcaacgcaatcagttccgaaactaccggaaaccgccccagtctacccctacggagaatccaagtggtacaagcaggctgactccggtctctatggaggcgcttcgatccgattcggcaacaagatctctaagggacgcaatgcaggcaagacacgacgaacctggaagcctaacgtccgccgaaagaagatcgagagcgaggctctgggcgagtcagtgtttatcaaggtcactcgtcgcgccttgcgatcaatatacaaggccaagggcctagacaactatttgctgtctgatcggccaacacgcctcaaggagctcggtcctttcggatggaaccttcgacaccagattatgcaaacaccggcgatcaaggagagatttgataagcagcgtaaggccttcggtattcctgagcccccgacattgagcaaatggatgagggaccacaggctggagatcaggaacaaaatcgaaaacctggacattgacgccatgaccaagcctcgcgtctctccgcgaagcagccagtcgtatgctcgctagaacagcttgagcgaccttgcgtgccgagggaaatgaacaggcgcttgtaccactatcctgaagatcgatggacggttttttgggcaccgcggattttgtgccatctttgtacgctatctcgtttcttgtggtagaaatgatggccacaaatttctaatttgggtgcggtctctttttcaatttgcgtattgggtcttctgtgtattatactccaatctcactgcgtgttcacttatcaagacgtttcattcaactccatctttacgccgagtctataacaacaagtatgtataaacggaatatagcattccggtcaaaatcaaaattccgccgatccaaagaggagtggatacatgagtgtatcgtcgtcagcctccaaagcactgccaatcccgttctcaagggtagaaaaggcctggacatgcatgccagccatcgacctagcatgatttgattcacggaaaaaacggatactcttcggagcgcatgtgactatgcaaaccacccagcattatttggtcatgcgatgccatcatgcgcaagacaccccgatgcatgatgaccgacgtcagcaaaggcatctgagattggatgtgggaagcagactccgccgagatgtgcctccgttccgtagactcgaattcttttggctagaacatcgaaggcatcacgtaaaggttcggcttgaacccatcgctcggcgaggataaccagcgcagttgagcaggcgcgtaatgcttctgggacttctcgtgaccggtaggcaatggttcaatgctaaggtggagttgtcagaagcagtatagaagggtgatacctacggcgacttggctcaagagctaattaccagactaggtcggttgatagggaaaataatcgagggttaccagcacataccccaggtcataattgtgctgtttgtcggtctttttggaaagtccttgccatagcaatctatattgtacaggctgagactggctggtgaggatcgtgaagttataagccatgccaacccatcgatcgctcgtgtagcgttttggggcaacatcgctcaatagccgtaattgagacctctaggagtccagttcacccaacatatgttctcgccatgtcgttgaggagatttatttgaaatttgtaagcgtgcaaagcttggggaagatcgatatgtgtattcgtctagctagttccatagagaaggtaccccaaggccatatgaccgtcgagacgacggtaacatctgccgtgccaggaaggatttgattgattgtcagcaatgattagatttcaaagccaagtatgcaatttcaccattgccaatcgcgttcctggtaccaatccgtgttacgaggtcggaccagtccgtacaagacgtagttaaaatcggaccagttctcgttgctatcgatagagagacccattcaaaagcccgaaatatgcctagagatatagaataagtaaattcacttttagcctattagataccacgcggataaagaatatcacgtgcatctttccggtcgacttatcatagataagcttgctttcgtgaggggaaattggctgaataccgcatgatacaagctctcttatggatatgttagctttataagttcaatgaagatagagaatgaacttactggtagactcgacggaattctttacgcatagcgtcgcggacttcaggcgtctgcctccagatatacagcttagatagcggtacccctggaactttctcccagataatataggtaatgaagcctgagggaataatgtcgtctgattcttactatgcttcttggtagctaagaagcttaaaaataacctcacagcccttctatatgagttccttcagtatatctcactcattcgtagtttgtgttatagtctgctttacttaaatacttgacttcgagatctgggtcccagtaatagggatctgctggtagattcgcacaaatgctggcctctgagctgggttatctttacggtagcaaagaaatttagcggcaacatatagatacctaaagcctttttcgatgtcatgctggtctccgggataagaaatttcattcagcttcgcggtgattacccatgtcacagacggcagcagaaggtttgtttctgtcttagcgtcagtggtgatctcggtgcctacaaggtcacccatcaaatcagtttcagcggtatccatgttggacctgtagatttccttgataggggcataggctaggggtaaaatggttgaggagagaaaagaggagagactcgagaggtatggtcctggatggatgcagggagtaactgtagccttggaggtgtaatctatgagtaatctatttggtaaacggtgacgggtctttccgccgacaggaaaactaaataaaacacatattagaaactattctaatcattcaagccagacattattgagataaccaagttgttgcatcatcttaccgtttactagaatcaaaagcggtatataaagtagggctggcagaactacccgcaagcggtaagagaaatacaagcgcagaagaggaaccagagatgctgagaggggtaataattatttatttcgagtccttttgaccttcgcttttgtaatattttacctcggcaaggaagacaacactataatgcctcagaaaattaccgtggctgtggcacaagcccgcactctgtctactctcgagttgaccctcgcttctctcaaggaaaccacccagcatgcagcttcaaagggcgtccatcttatactcttcccagaagcctacctaggcggatatcctcgcacttgtgactttggaactgctgttggcgcgcgtgctccctacgggcgggatcaatttcttgagtacttccgtgctgccgttgacctgggcgatacgcctgctggagcgggagatgactgggtggagcgtaagctacccgtggcccaaggtcgagaccaccgtggtgatggaacaagagagttcctcgagcggctatcccgcgagacgggcgtctttattgcaactgggttgattgaaaaggccggggggagcttgtactgctctgcgctgtatgtcgatcctttgaggggtgttctggggaaaagacgaaaggtcatgccggtaagtacatgcaaatcaatttttgctgtcatttatagtcaaattggaagatatagactaatgctgacttgaaattgccggaaaaaagactggctcggaacgtctcgtgtgggcgcaggggtctccttctacattaaaagctatcaccacagagctgaatggagtcaagcttactattgccgccgctatctgctgggaaaacttcatgcctttgcttcgtcaaagtctttattcgcaaaatgtgaacatctacctcgcacccacagctgacagccgtgacacctggctgcctctcatgcgcactattggtggcgaaggccgcacttttgtgctttcttgcaaccagtgcgtccgctacagtgaattaccgtcctggatcaccgagcagggtaaaaatacagaaggtacgtggtatatgatcaccctcagtttgcttacttaggtgttcaaatgactcattttctcttagaagatccagaccgctatatctcgcgtggtggctcctgcatcgtcggacccttcggcgaagtcgtggctgaacctatctggcaagtctccactgacgatgcagctgatatctctagcatcgaaaatgcgcttgtgatttctgacatagacttggaggattgtgaacgaggccgacttgacatggatgttgcgggaagctattcaagagatgcattccggttaacggttgacgggttggacctgaaccctcctccgttctaggaatcaagtacaaaagaaatacagttgggcaactctcataagaatgagaaatcttggaacgcctaactatgccaatacttggacagaaaatgtggcgaaatagtgtggcacaaggtgtgtattcagatgtgtatgtacatactagggccgatctataaaatatattattttgcctcgcttcactcagcaaaatcaacaatatttctttcgcaggtcttgtccgatgcaaaaggactgtacatcaaaccaatcaacaaataatctatatgttatctctgatcattttcgatcctaaataggaatttccgctggatgcggttcgctaatggaagttggaatgcggccagcagaggtgggccggattcagacgccaatccctcgggatcttcgtacccgcgtcgatcatcaagttcccttcttcaatactcgatctttgaccttgccatctttcctattatgacttgatttcaacacaaacactgtcccttgtataaactcagggataagcacacgccctcaatgcagttcgcgttacctccacggcggagcccgcatcgtctacctctcccccgttcctctcgaatgtcatcccatcgcaggaaacagttaaaatcggtcgccgtcctcgcaatcgcaatattatcccttctctatctcatccattacctccactccccaacctccatgtccgtggtggcttcggcgggtacttctggagtggtaatcgtcacactgctagaccgtcaacggtgcagcgagagctatctcaaaaagatcattgcaaacagggaggactacgccaagcgtcatggtaataaacccctatacaaagcagtgtggaggagcttcgcaatgaacttgatctaactttcatgcgggaacaggctacaccaacttcttcgcgaaagtctcagattatgacgaagccgttggcgatgctcccatgagctgggccgttgtaccagccatccgtcatgccatggcttcgcatcctcactcggcatatttcttccatctcgcggctaatgctttgatcatgaaccctaccaaatccctcgagtctcatattctagggcagggccatctggaaagcttgatgttgaaggatgtacccattgtgccgccagatagtatcattaagaccttcgtgcaccagaaggaacaggatgtggatcttatcatcacccaggacagcgaagatttaaacccgggaagcttcattttgaagaacggggagtttgcgcgtttcttcctggacgtctggtttgacccgctttaccgcaacttcaactttgctagggcggaagcccatggactggtaagagaaattttttactctattactctatctttatatagatagcgcttcgagagccttgattctgaccgacactttgctaggatcacattttgcagtggcacccaactgttcttgctcgaaccgccttggttcctcagcgcattctaagctcctatagcaaagactcgccgggtgctgctttggacggcacctacaaggatggtgacctcgtgatccaattccatgggtgcggtgatgcagaggcccgagactgtgcccgcgaactagagccgcactacaggctttgggagaagaagaaacagagagattaacgttcttgaagtgacttacattttggggtccacagtttctatgtggggaaatggcgttttgcttgggatctttcttctgttcagggtggtttacctagttataatgttctagggttgatcagcgtttggtcgtggagacctcaacatatggcgtatttttgctttcattggcatgcatagctgcaaaagggacacgataattgttttctatgtccaataccaaataatacatcatctcatgatatcagtaattagtgcataccgtttatcatgacaactagggttgatcgataagctgctcgagacttctttcaagccatcaacaaagacaatctaatgccttgctataattttcttcccttttcccactcaatcactcagcccatggccatagcatatgggatcaccaaataccagcctggacttgaacattcggccaacttcttaagcaaggccggggaagatgacagagcgcttcttcttatacttgtcaccaaactccttgcggtagcgatactccttcttccaagcccagctccacatctgcaacccacccacagcaacgaagatcagcacactccagttcaactggctgacaaggaaaatacccaaccaagccagaatctcaaagaagtagttgggacaggtaacgacactgaagccgaacccagacggaatgcctcgctcagtggtaccgggccggcggagattacgcaggatgtagtgcgcattcagattcgccagctcaccgaagacaaacagggccagtccggcgtacacaagagcctgattgggggtactgctggcggcggtcgcgtccggacggaacacccagtaggcgatgttgaaaccggccagaacccagtagtgggcgctgttcttgacgatgttgcgggcgggcatggtggcactgctgaaacggtgcacaaagattgtctcgaactcgcgcttcaggaagtgcacgcttagcagtgcgcagactaggagctggaggtttgagggtgaggggaggggcttgtcgaaggtgaagtacaggaggggtcggagtgggaagaggaagagcgcggggatcaggagtgggccgaggtattcgatgatgaaaacggtgcgccaggcaatttggggtcctgaagaactatatgttagcttctatgtgcgtggagaagagtgcgctggtcctagggctggattcgcattgtccatgatatgggggaaagacacgcaccgagatccttgacgtagatcacgcttgagtttaacaggccggtatcctcaatggtgacattgttcgagttcgggaccacgctgtggtcgctacccttggtgattctcatccggtgaattgagcaaccggatgctgcggagagcgcaacgtgcaattcttcactagaggcatcgagagatatctcaatttccttagggagcttgcggatgggcttgcctgattttagattagcgatgctcttaagctactctctctgtgatcgagcgatttgagaaaaagagctatgtatgcgtaccccttggctgaacgacgagtgtgattttatcagccgccatgatgataacgcagcttaagcagatacaatgcttaaagatggggcttatttgagaccaccaagataacttgaaatcgcgacttggctaaaaaacgtgcttgtcccaacaatctacaagttgggcctcggttgacgtcacgtgttgacacctgaggccacatatccaacgtcgcaatattttgcaatagttgggtgtctttcccagaatggcctcccacggtaggttgccttggcagcttactgaaaacaggggttcgtatggaatactacgatctttgcatcttggcgaactagcctgtggctatgcctgttgctctagatgtcttttgttggagattcgactggcctatccgccaatggcacactgtccaatgcagtattccctcgaggccagcttgaatgtcatcatttactggggcagcaaaggctatatatttcctccgtatctgaagtcacctggcctgtcagccgaaacaagggtatccccggaagctaacgaggccgaatatgcactgtagcggggcatggtggttccagggcagtgctggattttgtgggagctgagaaaaaaacaagctattgtaatatcaaatggcaacgtcaaatcagaatcgaatgatatcgccccatctaccccataggtttcagctccatcttgcacggttactttgaccgaacagcatcgtcagcatcgccaatcattgcccaaccaagaaccaagacagatcatagaagttcattattagagttttttacatgccattcgtattacattgtgattttctctctatgaaaacataactttttgcatagcctgagcgcatcgcagatcttcggacccatttagccgctgctactgccccaatcacagtgtgtagttcgatccacactacgaatcgaaccattgaatgtgctaatatagctcgtgtctatctttatctaggcagtcgtaatccgggtcattcgccataattggctagacaaataccataagacctggtcgacagggtataccccgtatagcatgcgcgaatcagagatattcgattgctcatagcagccagtggggcggtcctcttcacacacaaggtccaccttacgctaagaacgaccacgaatgagggcgctgctggacttcgagaatgtgatgtgcattcagccgtacgctttgctcggatggctctctcggcttactccgtgattaccacgggaggcttattataataatacacacccatttccaccgaaatgatcgcatgatgattcacttcgtcttttcctaattacctttgatagttgtgttgctcttttgcttccatatatacatataccggtaagcgactactattgtctttattgttcgactttcaactatacggcctcggctcaaggtcaacctatgacctcgaagttgacagattaatcacagttcgcactcggatttcttctgtatctgtattataccatctcaattcaccatgtctgaggaagagtccagcagcaagattgctcaggttgagcaagttgtgtctgcagccttgcggcccttgcccactcaaactggcgatggcagctatgtacaagagccaaccgtgacaggccttgctaaggacctactccactttgacctgaaagatgccaaaactttagcggaggttgccaaaactgccgtgactggcgaggctgtgaatgacagagattatatcatggagcgcgtgattcaggtttgtattttcgcgaggaattggctatgttcccactctaactgttctacagcttgctgctggcttgccttcgacatctcggaatggcaaggaactgaccaataccttcctcacccaattgtggggtgatctacagcacccgcctgtctcgtgagtcatgcaatagcgatgttggtctgtgtgggaaatgtccagtgactaactagtgatgcagctaccttggacgcgaggcggcataccggaaagctgatggatctggaaatgtaggaattgttcccttatagatcgagtatctctgctaaacagccctagaacacattttggcctcagattggtgctgctagcaccccatatgcacggtccgttcgacccaagaccatgcagcctgctgctcttccggagccagaggctcttttcgatagtctcttgtcccggaaggatttcaaggaacacccgaacaagatttctagcgtgttattctatcttgcctctatcattatccacggtatgttatttctgttggttgagatctttgctataagagacacaagaatcaccgaggctaacagttttcagacttgttccagacggatcctcgggaccaaacaaagtcattgacatcctcgtacttggacttgtctccgctttatggcaacaaccagaaagaacaggatacagtcagaacattcaaggatggaaagttgaaacccgactgcttttccactaagcgggtcttgggattccctcccggcgtgggcgtgcttctcatcatgttcaaccgtttccacaactccgttgtcacgcagttggcagctataaatgaaggtggccgtttcacgaaaccggatgagtcaagtactcaagcttatgctacctgggataacgacctcttccagactgccagactggttacttgtggtctttatgttaacatcattctgaaggactatgttcgaactattctcaacgtcaaccgaactgacagtgtgtggagtttggatccccgtgcagagatacgggatggcttgcttggcgaggcacctgctcaggctaccggaaaccaagtatctgccgagttcaatcttgtttatcgctggcattcttgtgtctcggcccgggacgaaaaatggtcagaggatctgtataaagaattatttgatgggcaggatccgaaggagattagcatgcagcaattcacagggggtcttcgccaatgggaatcaaaactcccggcagatccccaagaacgtcctttcggcaaattacaacgccaagcagatggaacttttgatgataatgatctagtcaagattctccaggagagtattgaggaccctgccggggcctttggtgccttgaatgtgccggatgttttcaggaacattgaggttctcggcatcaagcaggcacgttcttggaatctggctaccttgaacgaattccgtcagtactttggtttggcttcttatcaaacctttgaagagatcaactcagacccattcgtcgcgaaccagcttaagcatttctatgaccaccccgaccttgtcgagctgtaccctggtctcattgtcgaagaggctaagcaggccatgaccccgggtagtggtctatgcaccaactttacgacctccagggccattctatcggatgcggttgctttggttcgtggcgatcgcttctatactgtcgatttcacaccgaaacatctcacaaactgggcattcaatgagatcaacaatgacgtctctgttgatggcggccaggtcttctacaaactgatcctgaaggcctttcccaatcatttccgtggtgactcggtttatgcacacttcccaatggttgtgcctgatgagaacaagaagattctgactagccttgataaggctaaaatctataactttgaccgaccattttacacggctccgccccgtttcatcaattcccactctgcttgcacaagaatcttgaaagaccaagaaggattcaaggtagtgtggggtgataagatccaattcttgatggagaacagcggccgtccttatggccgagactttgccttagcgggtgatctccctgccaatgaagcttctcgaaagatgcttggtgctgctcttcatcgtgaaaagtgggaatcagaagtaaaggccttctacgaggatattactctgaagctcctcgagcgaaactcattcaaggttgctggcgtcaatcaggtcgacatcgttcgcgatgttgctgttctcgcccaagttcacttctgtgccaatgtcttctccctgtctctcaagacagagtcaaacccaagaggcgtgttcagtgaacaggagttgtatcagatcctggccattatcttcgcttctattttctacgatgttgacgtgtccaagtctttccaactttgccagactgctcgtaatgtcgcacagaagctgggtgaactgacgctagccaacgttgaactcgttgctaagactggattcatttctagtctggtcagccgtctacaccgccatgatattttgagcgattatggcgtccacatgatccaacgcttactcgacagcaaattgccggtcaaggacgttgtgtggtcgcacattcttcccacggccggtgcattggttgccaatcaaggccagcttttctcccaatgcattgactattacctctccgaagaagcggctgagcatctggttgaaatacagcgcttgtctagggaggacactcctgaggctgacgagcttcttgtgcgatagtaagtttcttcatattccattacaatttaagaggccatactaactgtctacagcttcatggaaggagcaagactccgatgctcggtagcattgccacgatttgtcactaagccaacggtggtcgaagataacggtgagaaggtcactttgaaagctggccaggagatcatttgtaatttggtaagttctttgagtcctttgtctcttggtattcagatgttaacagagtacgaaatataggttgttgcaggccgtgatcctgttgcgttccccgatcccgacaaggtccgtctggaccgtgatatgagtctgtacgcccactttggcttcggtccccatgaatgcctgggtgttaaaatgtgccctcttgcactttccactatgctcaaggttcttggacgactggataatgtccgtcgcgcccctggtctccaaggccatctgaagaggcttgacggactgggaggaatcgccatgtatatggatgccgagcacagtagcttctctccgttccccatgacaatgaaaattcaatgggacggagacctgcctgccaggaaggagtaaatgcatacgtgagagcttcaaaggatgtgaatcttgtttgagagatctctataatatttgcggctggttgtttgtatagcatgcatgcgttttcttagggatgtggttcaccgcatatcaataagtttgtagcaggcttttactctgaactcccacattttttcaaaaatagttgagagattgtggtcaagcatatttcatggtatctctccgtatgtaagataaaatgcaataattccagggttgcatgatatttgtgccgacaaactggaagtaaagacaggcagtcgatgcctgaggcctagcggggggaaatgcagagagccgctccgcccttctgccttttgccggcaagaccagcttctcttcacattgcgtccttctcttctcttctatcaaccttccgccctccttcatcttttccctttgacatatccatcttaatagctccacgtcaaaccttgagggataacgacctgcacccgttttcccttatttgaccgacttgcgatatctcatctctcagctatcgatttgagctttctcacccaagtaccttcacgattggatggtaaattcgatctagcatcgcttcgaattgccttttattgatcgtgaaatattactcaggtccccatcacgttgaatcgattcgattttcgttgaggcagcaaaaaagcatcaaaaacgtcataaggcatcttcgcgctctctccgcgacaccggtctttacgaccttttcaccccaccctctctaggagacaaccctcctggaatctctcaactccctcatgtttgactggtcaatcggtcgttaccatggggagaattaagaaggtcgccagccaaaagcatgaggctacaatcgtaagttactccccgacagcctgatgtgcaacccaactaaaatttttttccttccatcacagtcaccatttttgcaagaattcatagcgcatgccacaagtattcccgttccagagctcccgtcgcttctcaacacattccctaagctatggccgttcccgcgcggtgatctctaccattggatcaatgtcttggaccgattcgacgagattctggcctcagctgtggacaaatacctcctgaatactggccctcagacccaactgtttgcccgaagtgttttggaggaatcatattcggccgatgagagcaagaagccagcagagggtgttgatgctaaactaaatgccctgggatacggccctgaaggagatagagagcttgtggaagcagttcttgatttttctcgccttttgctcgagaaatgtgggaaccgaagcctgtacagcagcagcgatcgcctaggtgacctgttgaacaccacctcactttctctcctacaatctacattgcggctgtctctttgcttagctcaacgataccactctcgccagcgtggcacccatcaacagtccgtattgcagtcccactatgcgcttgatctcgaaaagttgcagaaaattgcggctcctttcccgcgtccagccatcgccagtaaaacaccgtttggcacgtcttcccccgttttaaccaagggaaaggaaatcacagccaagacgaaagtcaacgccaatgaactggtttccctcgtgcgtgatgacgatggctgggaggaatggggagatgttcgagtcctgtactatccctcaggctctgaacaggccagaactacgtccgaatttggccaaacagagcacggctcacacgttccagctacgccaactccattgcgacgtagcgcacaccccactcctcattccaaccaggcctcgaatggagatgaatcaccagctgttatcggtgggaaggcagaagaggctacacgagcgggtaaagtcctagagcttccctattcaaaagtttcaaccgcaaaggtggaagatcttcttgcggcgaacttgcctcatctgccccttgaatcaaaatatgagctgcttcacaagctccgagtcgccaaggcgttgacaacgtcgcgtgctacgcgcgaacagattctttccatcaaggcactggcagtgacaaatctggcccatgttcagccggagagtaccttccaagcaaaggtccttcaatctgacatggaacaaccgaagcgtcttcagcttacttaccagctcgctgaagtggttcatctcggtgccagtggtgacctcgcggtctctcggtctgttcaaactttggcgatccaggcgttggatgctttggccaagcacaaggttcgtgctatcgacgtctgtgcagctttgagcgtcaatgtcaaccacggaattctcatgttcttgacccgtaaaatggtcaatgaactaggccctgaaaacaacgacccggatgatgcttactacgatgagtggcgagatgcgttgcttgcactcctacgcactctcccaagctcgagcacacgtactccggagaccttggttgcagcaggtctgattcccatgtttgttgacatcttgaatctgcggactgaaaaatcccgccgagtctattcccgtatcatggagttccttgacacatttgtgcacgcggtccgtgatgcactgggtacattgacaacagcgaagggttttgacgccatgtctgatttgattgatcacgagaccaagaccgcgtttgagaaggtcaatcgaggggatggatttcctgctaaatacaaaaacccttcggttgactatcaaattccttactttcagcagcagactctgcgctggatgttccgtttcgtcaaccacatcatgcagcacaatggtggaggcttcgatcgtgttctgcgcaacttgatcgattcgcctcagctgttgacttctcttcgccttgtgttcgagaatgctcgtgtgttcggttcacatgtttggagcaacgccgtcaacattctcagcagcttcattcacaacgagcctacgagttatgctgtcatcgccgaggctggcctcagcaagagccttcttgctgcggtcatgggtcgtgaacttcacgttctggagaagccgccggccgtggaacccgaagaccgggagactgagaccgacaccgaggccgaaccctcagccactcaaccgcccagcgccgaagccgctattcagtccgagggaaagcaaaaggatcgcgagtatgccatcgtcagaccccagaacacccctctcgcacctggcataatgcccgcggctgatgctcttgcttgtatccctggcgcatttggagctatctgcttgaactcctccggtttggacctcttccagtcctccgatgcactagaaagtttcttcgagatcttcgagaaccccgagcatatcaagtgccttaaggatgacccagaactggttcgttcgttaggcacgacctttgatgagcttgtccgacaccacccagcattgaaaacctctatcatgtctgccgttcttgtaatggctgctcgtatcaacgttctggggcgagtcaaggcatgggagctaggtatgggcacaaaaatgtggacccaagacgccgacggcaaaacaactctttcaggagatgtcttttcattgttccgagagatcggcacagccgttgatgcacccatagacgaccctgcctcgtttggtgctccccagctcaactccaacactctgcctaacggcgctaagcttgtcgttggggatctagatcacgtcctcccttcgccgggccccaactttgagcctagagataaggatgatcatggcctttcggctacggactacctgttcccagctttgcgattcctgggcgctttcttcgagaaccagacgaactgcacatccttcatcctggccggcggcacagagttcttgttagacattgcaacactccaaagcttggcgtttgatttccacagcactaacgccaaccaagaggttaccgtgcttatccacatgctagcagaaacgaagcctcaccttgtggtcccatctcttgttcgacgcgcacaggcagcagtggacaatctttcagccttttggactgcgcccactggatcgggattcttcacagaattgatcaagccagcagattcgaaaaaccctgctctcgagcctacggctgctgctaaatctggcacattcttcgtgagacatttgaatgctgttcttctccttaccgatgtccttcgcgaggttttcgcatcgccactgtaccaaacccggcctggtcagtctacctctatctttggccaagccaaccttgcggatcactactgttccctagtctcctcattgagcaaccttcttgcttcttgcgtgtgggaaggtattctcctagagaagaacatccccgagaagtggctgaaagcgacacaggcctctgctgaaaagcatggctctggaaagtcaaaggctgctccggttactgggaacctccaggagccttcagcaacacctggcgccgaacctcaacgtgagggcactagtgcatcagagacttctccagctcagtcgggccagggtccgaaagaagacgacaccgaagttgatgaacagtgtcctgctttcaagaatgcgcgtacgcttcgctaccttctaagcgctctgccaacctcgattacgggattcttgcacaacctcggactcgggattatcggcaagagacgcacagatccgctgcagaaacagaaagcgaatgcatttttggtctcagacgccattgctgaaggtgttcttcgccaactgcagttcgacccggccaattccagcaacagccccaagcatcgtttcgcatatctcattgtcatcctttcacacttctcgcaccttctttatgaagtctcttcagatcgtcccagtccgaactacttgacttcagttctcgtctcgttcaataaaaacaacggcctcaaagtattgaaagacatctgtgacgtcttcttgagtgatatcaagtcccttccatctgcggagtctattcccgaccaagacaaggagcttgctgaccggcttgcatccggatatggtggaattaaaatcattcttggattattcgcagacctcactgctgggaaattcatcgtggactctagccagacacaagccttgacttctcaccctgaccgggaccgcgaccgtcccgactacttccagccaggtcaactcttggtggatcttcgcatggagatcttgcccatggccagagacatgtggaactcggactttgcgacccagtcatcgagtccaattgtccgattgttgattgatatcatgcggttctccttggatggtgaatacgaggctggcgcggctcgtaaagcagataccccgcccgtcttggtagaggtgcccaagaaaccattcgtggtccacacggaacgagcaactgccttgcttgagaaagggtacacggatgttgatctcaataaagaagccctttatcgttgcaacaatcttttaacggcggctgaagaatactgcaaggcccagcagtggctacgagcccctcccagagtacccccgagtcccggcgatatcaaaaccggactacccgagtctgcttctggcatcgacctcctcgatgaccctggtcttggagaggttccacctttcaatactgccaattcgttagaccgctctggagccctccagttgattctagctcaggcgcaacgtcctcctttccccggaggcgatattgactccgacatgcaccgcaatttggccgaagctctggacaatgttctcaacgacaatgatgacatggatagcgatgatcgaggcgagtcatcgaatcagcgtcgacccgagagtcgtaatatcggggcaagctcttccgaatctaccgcgccccctcagggagaaccggtgaaacgtcgccatatggtcacaatcgaagatctggatgcagagaggcaaaacattcggtcaaacctgatcgatcgggctctggatattctaaatgaacatcatgatgtctctttcgagctgtctgacttgataacctcggctatcaagaagcacaacgagcctgtcaacttccgtcgagacattggagagactctcgttcaatcgctagtctctctacaaatggagaacttccagacagctggcaaaaagattgcagcttatgcccacattctcgcactgacccttcaagatcctgacatgtacctcgccactcttgaagagctcaaagattgcttctcgactttccttggatttatcaagctcccaacacctgaaaaggctgaccaagaaaccttcccttgggttggacacgtcctgctcattctcgagaagcttctgtctgatgattgccagcctccccagattgcctggaaactgccaagtcttgatgatcccaaccccagcggcgatgaaccagcccgtcttgaagatccacttgtctccctcgatgagaagacccagctatttgaagctcttgtcgagatcctccccagagtgggcaaggatgatacactcgcgctctccatgtgccgtgttcttgtcattctcacccgcgagcgcagcattgccgctcgctttggtgagaagcgaaaccttcagcgtttgttcgtgatggttaaacaactttctagcgctacaaacgataaacttcaaagtgccttcatgctgattcttcgtcacatcgtcgaagacgaagctactatccggcagatcatgaggagcgaaattgtggccaactttgagtccaagactacccgtcagatggacacgaacggctatgtacgacatatgtatcacctcgtgctgagagctcctgatatctttgtggaggttacaaatgaaaagctacggttgctccgatatgacaaccatcaacgtccacaggttcttggattgaaggccgacaaggatcggcagcaaaagcgaggaaggcccagtgtctttattgaagagccgaagccagaatcatcttcagcgggtgaagcatctgcccctgaaggcacggacaagggcaaggcccaaaccaagggtgccgaactcaaggccccaattgtggagaacccggatggtgtcattcattacctgctttcggagcttctgtcctacaaggatgtggacgacaaagaaaccagtcttgaatcctcagagcaggcagctgaccaatccgatactcaaactgatgttgagatggctgtggacgagccaacaccttcgatttcgagcactgccgaagcacaaacatcccgcggttccaagaaggcagaaaagccccaattcaaggcagatgaccatccgatttacatctaccgctgcttgctccttcagtgcctgacggaacttctttcctcttacaaccggactaaagtcgagttcatcaacttttcccgcaaggctgatcctctagccactacaccctccaaaccgcgctctggcgtcctcaactatttgctgaacgtgcttgttccccttggtaccatggatcatgatgagtctttggtgttcaaaaagcgcagtatcacctccacatggaccatgcaagtgcttgttgcgctttgcaccaagaccggtgaatttggtggtgttggtaaacgtcgtactgaccctaagtatgaggaggatgagcctgagcttgcttttgtccgccgctttgtgctagagcatgctctccggtcctacaaggatgctatggcctctactgaacccctagatgtcaagtattccaagctcatgtctcttgctgacctcttcgataaaatgctcagcggctactccttcaccaacgatgcgggcttcccaacttcaaccaggcagctcgcgaagaccatgttcgaaaagaattttatcccggcgctcacttcttccgtcgccgatgtcgacttgaatttcccgtcctctagacgtgtcattaagtatattcttcgtccgttgaataaacttacccagactgccgtacttctcagcgagacctcggacatcactatccaaggtgataacgaggatgatgagatctcatcggcaacttccgtttctgacatggaagatgaacgcgaagaaacacctgacctcttccgccactccactctcggcatgctagagcctcgtcatgacgaggaagagagcagcaccgaagaatcggagggtgaggacgatgagatgtacgatgatgaatatgacgaagaaatggactacgacgaggatgtcgctgaagatgatggtgaagtcgttagcgacgaagacgacgatggcatgggtccaattgaaggtctttccggagatgcagtcgaagtcatccttgacgaagatgatgacgaggacgaggacgaagatgatgaagaccacgaccattcggacatgcatgatgacatgtatgatggagaaatcggtggtgacagagacaacgaaagcctcgaagatggcgcagaggacgaatgggaaagtgaagaaatgaccgaagacgaagaagaggtcgagatgatgaaccagtttgaagatgaaatggccgacatcagacaatcctctagacaccaaggtgaagatcaacatcttggtgacctattccgtgctctcaatggttccggtgttgatgatatccatggagatgctctaggtggtgatattcacgaagaaatcgatgacctcgatgaagatggtttgtccctccttagactgctgaggcaacaaatgccggcgcaaccaccagccttgctgacatccggtccagttgaagacgaagacgaaatggatgaacttgacgaggacatggatgatttcgatgaggaccaaggatcttatgaggatatggaaggtgagtccaactctctcgatgattttctcacagcattgctgactctcccagaagacgatgatcttcttgagccgtggggatgggaaggcgatgaacctccaatggcccgaggacatgcgcaatcccgcttccgcgcagccccaccaccggcctgggctaccgtcactgaaatcatgccgggtcgcccatccggtctcgttcccattcagccttaccaccgtgtccaccgaacccaaatcccgactcacggcaacgatgatggcactaatcctcttctcgtccggactgaccgcccagatcctactgttccacctcgggttgctgctgatgctttcgccgattggggccagtctatggaccctgcaggtggccgggttgttgccatggatagccccatcagcttcatgaatgccattatgcaagccattggcgggcaggcagcgccaggtttcggcgttgtcactcgccctgatggtattcacgtccatgtagaccgacgggcggtcttgcctggtcgtatccaagatatgctcgggattccccgaggagcaggccctccaactcgcactcgcggcgacgaccctcacacggccgtcaagtttggtcttggtaccaccagaaaccgctggcaagaagaggcccacattatcttcaacagccagtatattgagcggacccagcgcgtcgtcaactccattctgaggctcttggttccccctgccatcgaggaagaaaagcagcgccagaagctcgcggaagaggaacgcaagcgtgttcaagccgaaagggctgaaaaggaccgccaagatcgcattgccgctgaagaaaaacagcgcgagcttaagcaaaaggaggaggaagagaacgcccggctacaggcagagaaagaacagcaggaagccgagcgccaagctgcaggggttgatgagcccatggaagacgtccaagaaaccgatacggttgaagacgctggcccatctaatcaacccgaagcccaacccgctgaacccgctcgtcgagtctacacgaacatcaggggccgccaagttgatatcaccggtctcgagatcgattcagaatatctagaggctcttcctgaggaacttcgggaggaggtcatcatgcaacagcttgctgaacatcggtcccaggctgctgctgcgggtgaggaggatactgagataaaccaagaattccttgaggccttgcctgccgaaatccgcgaagaattgctacaacaagaagcggccgatcgacgccgacgggaacgtgagaccgcacgacgacaggcggccgctgctggtggtgctggtgctacgtctagcactcaaccggcggaagaaatggatgctgttagcttccttgccactctcgatccctctttgcgccaggctgttctcgccgatcagcccgaggatgttctcgcaaccttgggcccggattacttgaatgaagctcgtggtatgggcggtagcggccgacgcatggcccagtttggtgacatgagtgccattgatcaccgacagcctgctgcaggccaagagtcgaagaaagagcagagacgtcaaactgttcaaatgctcgacaaggctggcgttgcaacccttctccgtctaatgtttatgcctcttcagggcaacgctcgccatcaattgaatgatattcttcacaatgtttgcgagaaccgccagaaccggagtgaagtgctcagcgttcttctttcgatcttgcaagatggcagcgtcgattctacggcgatcgaacgcagcttttctcatctttctctgcgtgcaaaggcaccaggagcacaaaagacgcctcagtctaagcgatccctcgctatccagactgcctcgagcgtcagcagcgaagtgaccccgattatggtcatccaacaatgtatcgccgcgctgtctttcctctcgcagttcaacccacacattgcttggttcttcctaacggaacatgactctgcctcagctggtaaactcaaggcattgcgtaagggcaaaggcaaagataaccgagctaacaagttcgctctgaatgccctgctttctcttcttgaccgcaagttgataatggagagccctaattgcatggagcaggtgtctagcctcctgagtagtatcacacagccattgactgttctccttcgtcgtgagaaggagcgacaggaagaggacaagggcaagaagcctgagcgacctcaaatcgaagcatctgccgaacctgctgaggctgctgactccagtatggacacatccatgacggatgctccgcttcccactgtggaaacttccgaagtccctagtgaagagaccgcagagggtgaagaggctacttcagctgaagccaagaaacctgaagattccaaggagcccacaggagacgggaagcgcaagaagcgaaccatcgagcctcctgtcgttccggatcacaacttccgattagttgtccacatccttgcggctcgtgagtgcaatggcaagatattccgcgatacactttccaccatcaacaatctttccgctattcccggagctagagatgtgatcggcaatgaattggttgctcaagcgcaggccctcagcgataccatcctgggtgatttggaggatcttctccctcatatccaccaggccaaaactggtaccgacatgcaaggccttgctctggccaaattctccccggctagctcagaccaggcgaaattgttacgtatcctgaccgcacttgattatctgtttgaccaagcacgagcggacaagtccaaggatatcgagcctagatccgctccaaaggaagatgtgctcaaaaaactctatgaaagcgccactttcggcccgctttggagcaaattgagcgactgcttgactgtcattcggcagaaagagaatatgctgaacgtggctactattctcctccctctcattgaggcattgatggttgtttgcaagaacaccacgctgaaggaccagccgctatctcgcggcagccgcgaattgtcagtcaacagcaccccagccgatgctggtctcagcatggaaaacatattcttcaagttcacagaagagcatcgcaagattctcaatgagcttgtccgccagaacccccgcctgatgagcggcacattctctctgttggtcaagaaccccaaggtcttggaattcgataacaagcgcaactacttcactcgtcgtgtccactcccgcggcgccgagcctcgccaccctcatcctccccttcagctctctgtgcgcagagctgaggttttccttgactctttcaagtcattgtactttaagagcgcggatgagttgaagtatggcaaattgaatgtacgattccatggcgaggagggtgtcgatgctggtggtgtcaccagagaatggttccaggttcttgcgcgtggcatgttcaaccccaactacgctctgttcatccctgtcgccgctgatcggaccacattccaccccaatcgcctcagtggggtcaactcggagcatctgatgttcttcaagttcatcgggcgcatcatcggtaaggccttgtacgaaggtcgtgtactcgactgtcacttcagccgagcagtctacaagaatatcctcggacgatccgtgtctattaaggatatggaaacactcgacctggactactacaaatcacttctgtggatgctggagaacgacattactgatatcatcaccgaaaccttttccattgaaaccgatgactttggcgagaagcaggtcatcgacctgaagcccggtggtcatgacatccccgttacacaggagaacaaggaagagtacgttcagcgcgtggtcgaatatcgcctcgtcgagtcggttcgcgaacaactggacaacttcctcaagggtttccacgaaatcattcctcccgagttgatctccattttcaacgagcaagagctggaacttttgatttctggtcttcctgagattgatgtggacgagtggaagaacaacaccgagtatcacaactactccgcgtcctcttcgcaaatccagtggttctggcgtgccgtccgctcgttcgacaaggaggagcgtgccaagctgttgcagttcgtcactggaaccagtaaggttcctctcaatggcttcaaggaacttgagggtatgaacggtgtgagcaagttcaacatccatcgcgactatggtcataaggatcgccttcccagctcgcatacctgcttcaaccgtaagtttttctccgcatttcttgattacattagcgcattttactaactatcttaacagagcttgatcttcctgagtatgaaagttatgaagatctccgtcaacgcctttacacggccgtcacggctggaagtgagtacttcggatttgcctagactgctgtcctgttctacggtatgggaatggttttatcaagccaaagcattgcacggcgtttctctcggttcttacgagattttctttttatggggacgaatgcggaaagtggccagcgagaagtttctttatgagaagatgaaaactgaggcaagtggtaaggaattcggttgaagtgcaggtcaaccgtgttttttccagcgccctctctatgtacttagattgctgcatctatttcttttacttcaaatcggccgcgcactaatccgtactttactggccattgtgagtagaacttcagggcttccagggcttgctgatgtcatcaggcggtcagcccgtcacgggactacgtagaaaaaaagacatgcggggccgcggaggaaaaacgattttttgagccgaacacggtcatcttggagaagagtgtgttttgtgcatcttggattgaatatctcttctttaactgtttcacagagccctacatcatgtcgaccaactccattaagctcttgactggcaacagtcacccggagcttgccaacctagttgctgaccggtatgtgcaaccggctagggcaaaactgggcaaccggctaattctagaactatgaattaggctcggcattgagttgaccaagattatggtcctgcaatattccaaccaggaaaccagtgtcacaatcggagagagtgtccgggacgaagatggtaagaacatcccaccttaatcgtgatatcaagaacccccgctcatatatatatgatttgttacagtcttcattctccaatcgacaaaacccaatgatatcaacgatggacttatggagctcctgatcatgatcaacgcctgcaagaccgcctcggcccgccgtatcacagccgtcattcccaacttcccttatgcccgccaagataagaaggacaagagccgtgctcccatcaccgccaagctgatggccaacatgctccagaccgccggctgcaaccacgtcatcaccatggacctgcacgccagccagatccagggcttcttcaacgtccccgtcgacaacctgtacgccgagcctagcatgctcaagtatatccgcgagaacctcgatgtcagcaactgtgtcatcgtcagtccggatgctggcggtgccaagcggtaagccatgtctatctcgatactacacgtatatgtatagttcaagggctaatgtggatttagtgctactgccattgccgatcgcctggatctgcaattcgcacttattcacaaggaacgtgcccgccccaatgaggtctcgcgcatggtccttgtcggtaacgtcaaggataaggtcgctatcatcgtcgatgatatggccgacacctgcgggacgctcgtcaaggctgcccaaaccgtcatgcagcacggtgccaccgaagtcaacgccatcgttgtccacggtattctgtccggcaaggctattgagaacctgaacggtagctgcctcaagcggtatgtatacgtccgaatgccatcgacgagtcattgcactcttggatggtttccgatttttcggttcacttttggctaactctctactcgcagcattatcgtcagcaacactgtcccattgggcgacaagcaagagcagtgcgacaagatccatacgatcgatatcagcccaacattggcagaggcttgccgtcgtacacacaacggcgagtcagttagcttcttgttctcgcacaccgtggggtaaatcagaggcagaaatgaatttatacatcaagacagaggatcaaatctacgggttgtcctagtgattacctacgaatgttggcgtgaaacccgcggagtgagcgggaaacaaaaaaatacgattttcatgacctttattagccggacgaggatgttagtccccgggtgttttattattgtttactatacttttcttttgaagagagatcgacggttaagtgttggatctgcgcagttctctctggcggaagttggttatccttggctgggtttggttgcatcgtgcatgtatgtggtcttgatatgcagagtacatgtactttctatttggtttagattattgcaaggtctgggggccgctttacaacttgaattagatcgtcttttcttactaaggaggtgctgctatgactatgttgactgcatcggtgtagtcttaatatgttgttgatccaacgatatatataggtttataacaggggttcattactggtcgtggaggtgaagccggaacttttcccatccctatcttctccaaatacgtaccattgaccgcaaagtgcagtcatatcttgaaaaatataattccaaacgcctttcgatatcatagacttataccacgtgacctatacctaaacatgactttgggggaattgtaactggcagtggggaatttaaggtaatgacttgattgaactggtgttttaagtcacttcattgacacttcattcaagtggagtagaagagtccacagagaggaatacaatatgctacgcctactccttgaaaaagccatgagcaattgacagaactgagtattgaaatttgcatgcactccattcaaaaaaaaagggtcatcaaaaaaaggtaggttcaacacagatatgcattgcgactcccaaggcccgaaatcaccgtagccaaacacaagggagtatcaaccactcagcctgctttgtacgttttgagacctgttccccgtcacttttcttgttcccatttcttttttatcagacatgtatcctccgcgcccctgagagtgattcattttttatgaattcccctcaaatcatcccagagacgtgaagctcctccattaaaccccatcgccgcagaacgaaatcataaaaccgcgggtttggaagtttacttccgcatggaagaagctctccgcttgcggagctcatcacgcttggccttctcctcgtggacacggccggcaaggagcttagcgtagtcgttactatgtaaccgttagttcgagttccaaatcacatcaacactcataaatcattgatcagagcgaaatagagggagtcttacgcagcatcacgggcagtctcagcacggcggcgcttgatggcaacgcgttggcgcttgcgctggagacgctggggggtaaccagacgctggatcttgggggccttggtgtaatccttcttgccctccttggtgacggtacggcggatgacgaacttgcggacgtcgtccttcttgtcgagaccgaagaagcgacggatcttggtggcacgcttggggccgagacgcttggggacaacggtgtcggtgaggccggggagctcgccctcgccctgcttgacgatggagagagcaaggacggcaaggtccagaccggtgatggcaccacggacggacttgcgcttgcgctcaccggtgcggcggggacggtagcagctgtggccgtcggcaaggagcagacgggtacgggtggggaggagaactgtagaaatcattcgatgagcatcctgcggtttgttgatatccctgggggttggatataatttttttgatcattccccaggttgttgtgcggctgtgtacgtaccaccctgcttcatggggaaacctgtaaattaatcgtcagcattgtggttctcgttatgtgcgttggattgtattctccattatcgaaatgttgctccgacattgggaatagagattgtatgcgtaccctgcttgtcgttaccaccggtaatcttgaacacgtaaccgttgaactcgtcaccgagagcatcgccggcaacctaatcaaaagagataccagttagccagttgttctaatagtcgtgtgtgtgcgtatgttgttcatcgattgaatgtcggataggcggggaaggatgaagaagggagtgctgacttcggtgcccatgcgcttctccatgaagggacggagcttgcgctcatcatcgatctcgataattttctgggacccattggccgggtaggagatgttgagcttcatcttgacggaggcggcgcggtcaagacggtagcgcgggtgttgtcgatttgtgagattgtcgtcgagggagtctgtattgtggatttttttagttcgccggcttagcgaggtgcaagtcacgtgtcacgtgtgggaagtagggcttacgtcggccagatggggtttagcgtggcttggtaagtcatgtgactctgcatcagcaccccgacattttcttttcttcgtccgactcaacaaatctacggcgctggcccctaaaataattgatactttcagcgataaatataagactcaatccgacaactatgcatccaggcaacaacacatatcgaggaccgccagcaactacagtttacctccgccttgaaccgacacagtctcctttacctttaccctggcatgaaacctcccagtgtgactttcgaacacaactgactttgaatcaccatcggaatgatgaacgaaatgttcggatcatgactcagtctcgactggccgaactcaacttttatacatatcaaagactgagcacggtctcacaaacgcctcattgacagccaccacgagcctcgtacgacaattgcaaataacagcctccactaactatatttgaggacctttgatgtgaacccgcatgtcagacactgcaaacgccagtgcataacctctggatttgtaagacactatctcatggatagatggattagtcctgggattcagaaatccgatccattgggctcaaatccatattagggacgtttgaaggtgatattcaagatagccccacgacgtgtttttggatatgttttagatgtctctccccttcatagtgtcatagtcagataaaaaataattagtaggtcagtcctcgtacctttcctccatactttattctcttccatgcatcatttcccaataaaaacgttgtgtcacaaactccgctctagagatctgcagtatataatgtcttggcatgtctcataccgagaaacaattgcatgtccgacgggcaaagagttcaaaggaacgccaaatctcttgagacaatgcgaaacagaacctggacgtggccttgtgccgggctttgtatgcgatgcgagtactccgtaagtctagacctgatctccactattcggaactgaagaattgcgaaagggacaggagaacccaaatatcaccgagaagcttgctgaatccgtatacggaagaaaataccagatcaagcaattgtggctctaaatcggcgactctgatttgtccagtcggacgttagtcgactcggctctccgagccacgcggccaacctacaagtgtgacgaattcgcgcctcacgtagggattctggttttttttgggaattaggtcttctgcttgctagtcctagcttataatatagacacttccgtcctgtttctatcttctttccattttcccctagcgtttctggaggaaccgccacatacccgactttgccggtgctccttgtccgagtgggggatttcgtcgcaatctccaatttttttgcagtgccggataatctcctggttccccgcacaatcggtgagacattcgttcctgattatcttgtctcacattgcttctgggggattgctatatactttgggagcatttgtggcgacttcatctccgaaacaagcggacgacgtgaggtccaagctcgacattgctcgacattgctcaaggggcatattctggctgtggccgttcagtcgccatgacgcgccttttcaaccgtttctacgcgctggctgctgtcgcagtctgcatgattttcacatcggcgtggtttttgacgtcacggaggttctccgatatcgtcgtccctttggtctcagaaccgttccaagtagccagcacattcgaccagcgattagtggtattcggcgactcatggagcgacaacaaatcggacgaggcgcagggcaggatttggacggaccggctttgttcaatggtaagataaccacccgagagattaaaggagaaacaagcgtgtctgacagaacctgaaacacgattagttctcctgccaccaagagaacctagcacagacagccagtccaggcaagaacatcggcgcggtggtcgacaactcagaactcgaccatctagaccgactgtctcagacccacatcgccgacttcaagtcgcagctccggcaatggctagacgccgagtccgtcgcgatgaaggatcttcccgaggaagaggtgcggtcccgacaggaccgcacgatcttcgtcgtctcgttcggggtgtgggatctctggagcctggttacaaaggactacgacgtagcaagcaaatcggttgagcggcgcattgcaacgcttatgagccagctcgacacactgtccgatcgctggggcaccacggacctgaaggttattctgacgcagccggtcgacgtgactttcctgcccgggtttaactcggcgggggatcagtacaaggatacggtgcggatcctggacgagtggaatgggaagctgcgggaggtggctcgggagtggagtcagggcactatctatctgtttgatacgaatgcttttatgatggaccgcattcgtgactggcagctctatgcggccggcattgaggaagagaatggtctaggcaagaacctggttcctgggtgggagaatgtcgtggagccttgtgtcgagagtgggttccaggtcatgatgtcaaaggagaagaaacagtgtgaagatccagagaggtatctgttctggtgagtggttttcttttcgtcattccctatcagttgtgtatgaaatgtggttggggaagggatcgacatgtccaatgccttttttgctgactgtgacattgatgatttcaggaacgacatgcatttgggtccttcagcacaccggctcatggcggcggagatttaccatgggattgatgggattatgttgaacccgaatgggaccgagaagcgccacaaccggcggtttgcagcttagacattgtccagatgaataaagattcaaacatccaagacattcaaaaccttcaaaatgagacaaacaactcaaaaatgagaaaagaaagaaaaggaaaaagaaaagatcggtgacgtctggccgggggggttgtatagccatgatgtcggtacccgcgaagtcaaacgcagaaactatacttgatgcgggtgagccatggccaggttcctggacaatcaaagtgtgtgcggtggatctgaacccttggacatccaaagggcacggtagtaccgatggtcaaactggaacctggaacctgcagaaggggttattgaaacacgggaagatccagaccgatatccattacccgagacaagagggaaataggggggaagggtggtattgttcgaagcccacaagtgacagtgactgtaacgtgcagtggatcgcgagatcggcaatgagatcatcccagatcccggcagtctgatggtaatttgcaattacgggagatttgaagaataactgttttatgaattgaacagctgacaaggacaatcaagctcgaagtctaaaaaggcgaaattaattgtttcactgatttccagaaataagaaagaaataagaaacaaataagaaataacccaatttgttctctttgtctgatttgccggggaactgatttaggacataccccgaccaatcatgggccggataataagttgggtggaccatagtggaccctcgtgggccagctcgatcaagcgggtcgccgcatccggagacaaagaaaacaatgactctagtggtcttggccagggaaagagagggaaataggggatttcttggggagttgggagttgacacatcgattttggtctctttcggtttcttttggtttttttcttttttcttttcttttcttttcttttctttttctcttcttttcgtttcggtctctggttgggcctaatcggaaggtaccgtgtcgttgggagtatagaaatcgagatcccccaagtctccctatagcgaatataacaaagaaaagccgcgattaatcctcttttcgtacttttattttaatttctttttctctcggttggctcggtcagaatcccaaggcccaggagctattgtcaaagaaccaggcgctagacagggattccgggggggaacacccaacaagacaaagaaaaaccgcttttagggcttttgtgtccaaacgcccatatacttcgctttgtgctgatccctgatattccccggtctttcacgcattgcttattgggattatttcccatttttcctcccgaacggattcattttctttgttgccgtcggtccccatctctttcctttcttgttatttcttggggcccaatcgcccccaaacctattcccttctgccttctctttcaaagccgtatatacactttttttcctcctacctttcccttgtgaccaatctttctttgatcctcatcttcgccttcgagccagttcattcagagaaaagtattaaataaatgtcttacgatcgagttctccccaaccctgttgctctacgatatgagtctgcccaagtctcgctgcctagaccgagcaatttactcgatcacaaagtcatgaacgaagaattgcccaagtcggttatggccatgagacaccccgacggcgcagtcagatatgccgatccgaggtcaacggggatacatcagacacatcagcatatctccaaagaagcacaccggatgtcctccaatgggcccggcaagcctgtcgggcccatgatctctaccaaggaattgccattgcgagagagatcggatcgatcctcctcctcgtcagctagcagtaccagtcctgtcaaatcacacaaagagagtgccctgcagttctgcctctgtcagccggatccgaagattccccggcctcgtaatggtgagtcgatactgtccgcaccgtcattacagtttggcaagtgctttttcgattgtttcttttttggtcgtcgtcagccagatcggatctttcgaacgcatggacatggctaatattggtctagcgtttattctgtatcgccagcattatcaggccatggttgttgctcataacccgggcttggccaatcctgagatctccaagattattggagagcagtggcgttctctttcggaggaggacaagagtaaatggaaggcacttgcagaggtatgaaagcaatcccagagatatggattcaaacactgacattacaccaggaggaaaaagctcgccatcagcagcaatatcctgactaccgctaccagcctcggcggtatggtcgggatggaagcgcccgaagctcggccacaggaattgggcacaatccgtctggttcatcacattgtaacagatgtggtggtcgattgatgaatgcacccgcttcccccatgaccccgttcacacccagcagtgggcctggctttcgaccatcaaacttctcaccacacccaagtagcatgccgccaagaagcgtccaaggccgtgagaaagaccctagtccaccaaagtcggccaagatggaccacgatccccgctctcgccaacgacactgggaggaacccggtggtcgatctcctgacaacaaacgccgccgagtatcccaggcctcattcaagccaactttacatccctaccgggaccacagtcctggcaacggcgttccagagtcaccgcatccgatgaccccttggagtgctcgcccggagatgccaccacgccatctccccatgcttcaaccgcaacgaccatatcaaagcgtccagggacagtcacaccccgaccccagtctgaagctaccgccactccagaccacaacaccggtgatgactcccatgacaccctatccacaagaaggttccagtgtcgaagcaacagtcatgacaatcccattcctcaacaagatcaaagtcctcgccaaaatctccccacccctcctcccctcattccgggacggaatcccaccagcccgcggccccgtcatcgccgtcgacggccaagacccagacctcgtccaagcagccgtcgaatacctcaacaacctcctaaaaaaggaaacaaagtaccacgtacgggtattcgacggcccagaaatcaaagccccccgaccaacctccgcagaagccggccagatgggcgacgcgacagtcgactacctcaacaccatctccgcctggcaccggatctccgacgaagtcgtcaacttcgtgaaacccacctcgcgagccggctccgtcgacgcccgctccataaccacagacgaggaaacccccgtccccaacgtctccccccgcaccctcatccccaaaaccgcaaacatgcacatccactccccagtcctgtccagcgagaacggctccgaggtcagcgccctcacatcagccagccactacagcgtaccgattgcgctcgtcccgcgctaccagctcacgacggcggatgcattcgcctgctccacgcccatcggcgactcctacgcgccgctcgaccactggcagtggatggcgtcgctgtggcgcgcgtgtgtgggccctgatatcacggtttacattcgggagtgcagcaaggaggagcttgatcgcatgggtgggaatccggttgaggtgcgattgcaggatgtgcgcacggtggtgctacggaaggttgctgggagggatttggaggagaaggcgttgaagcggatgggttttgagattgaggattttttgacgcagtaagcttagcctgcttgggctgggctatagaatgtgatttggtgcattaggattgggttcattggttggggcatgtgatagatgggatcgtggtaatttgatgatggctcatcatgtttctaatacaatattactagtgaacagtgaacagtgaactgtataatgaggttaaaataacaatcgacgtgacatgtaaggtcctaagaagccagcgctcgggccctcttggtccaccgaaagttggagtctctgggtcccgaggcggagccgcttatccaaggcggtcaccattatgtatgcctatctccgcattttattttatccatgcatgttgtcttcctacaactattcaccatgtcggacctgtcccaactgggcccagagcgctggaacaggtcgccaatactaataagctctgaaccttctggtcttccttttatcccccctgccagtcctcctcccgatgtgaaattcgagatcgcagagatagatgagccgctcaacccattcgtcccagagccagatgagccccttgacccagaggtggatcggtcatctctaaatcgaggggaacatcttccacctctgggtagagagggctatctgcctctagatcccgaggttcatttgtcgcctctcgacccccgcaccccaaaggcaaatacgcatttcgataactatatcccagccggcgttttgggcaaaacccgctccacgtcccgctacccagactgcgagattagactgctggaaacacatgaatggatccgcacacgctttcttgtcgacagcagaaatgtacagattttcgtgctaccaagggcagagaaagtccgggatcaatctggaaagactctcaaattcaaggctctcagatacgctctcaaaaccgtcatgtccatggtcgatagctcctctgaagcatggaacggcttggttgatgcccgttttgatctacttgccaacagtcaacctgacagcgaagaagaatcactatattacatatacaatacgctgcaagaacccaaaccagacttggaccaagtaacagatccgatctcgtggcgtgttatggatgaattacttaccaattcggttcgaaatcttaaaacatcacttcatccgtttcagcgcgagtctgctgctttcatgattcagcgggaggtacagccggccctggcgcttgatccgagattccagcctttacggggtccgaccgggttggagttttattataataaggagtctgggagcattttgcgtgataagatattgtatcccgaggcctgtggaggtaatttttgccactaatctctcaatgatggtggtcaaatatcttgtgaactatactgactagtactagggatattggcagagtccatgggatgcgggaaaacactcatcagtcttgctgtgatattggctacacggggacatttccccaaaatcccggtggagtatcaaaaactcgagaaccccgtcaggcaaaagactggaacattattgcaaatgactgctgctgctgctgggcgcttttctctgccctggaaggagtacattgaccagaagagagcctgtgggcaatatctcattaattgtgagaaggcctgcgagacctaccgtggttcctatattatccccgcaaaagagaacgcaagatctagatcaatgtacgtccaattgcccgaggaaattcgtctctcctctggtacagtcgttattgtcccggacaacttggtggaccactgggaacgcgagatcgctactcacactagcaatctgaatgtcctggtactgcgaaatagtacccctgaaacaccgtcagcggacgaacttctagaatttgatattgtgttgttaactaaagcccgatgcgttagagagaatccaagccgtggaaagaggccagattctcctcttttcaatcttcactggttgcgagttattgtcgatgaagggcatgacctttccagtcgagtgacgaatttgtcccacttgctaggcaaactgaaattcgagcgccgctggatgatttcgggaacccctctttcggaattgtatggagtggaactgagcattgcatcgcgggaagtgaacatagacgatcctgtatcgtcggacgaagacgcatccttgcagtttcacaaaaagacgggcaatgccgtcgatactgaaatcaaaaatgtgagtaaattgggtgatatggttcattatttcttcaacctcaagccttgggccaacaatcccgaagattggctacgttatacaagagcggtgggtgaagatggcattcgtcgaaaatctccttctctacgtgcgatccttcagggtcttgttgtgcgacaccggtacgaaaccgtcaaaaaagagatcactcttccaccgctgtacaacaaggtcatctacctggagccgaccttctacgaccggctctatatcaacatgttcctcttcacactcgcagtcaacgccattacatctgaacgtgaaggtcccgactatatgttcaatgggaagaagacagggaaaaagaatagactgatggagttgatacaaaacttacgtcttgctggattttggtgggctggtgatgacaatgtccaaagtactgttgacattgctctggaatatctgcagaacaacgaagagaagatgacagcggcagatgtcaaccaattaaaacaaggtatcgagatcgcacgaaaggcaattaactccactggctggaatgggttcaaaaatatgcatgagcttggcgtctttgttcgaaatttcccagagaatgctcgcaacatgtgggctcttgatcctacagacgccgaccgcgagcccctgctcatgggtatgacgcaggcccttcgcgcgcaacaattcgtgatgaaaaatatgggcaggatcgatcccactgcaggtttcgcaggagagggtatcaaagttcgccaggggctgcttaagcaccagacggctcgttctgcttacagtggtgcccaggggccgatgaatccaaaggaatcaaccccgccaaaaagaaagggtaaacaaagttttgagaagaatctcccacagacttttgaacaaacaaagctggaaggagtagcatcggccaagcttcggtacttgctagagcaagtgctggagttccagaagaccgagaaaatcatcatcttttacgagcacgacaacgttgcctcctgggtcgagcaaggcctacagttaataggcgtcaaattccgcacctacgctagcgccgtgagcatgggctacaacaccaaatccgagaatctggccgcattccgccaaaccgacgaggtccgcgttctactaatgaacgtcaaacaagccgcgcacggcctgcacatcccagaagcctcacggatgtacatcgtcaacccaatctgggaacgcaacgtagaaagtcaagccatcaaacgcgcgcaccgaatcggtcagaaaagacccgtctacgtcgaaacgctcgtcctaggcaacaccctcgaacatcgaatgctccaccgcagcaaaaacatgacttccgaggagaccaagaacgcaggaaagaacccggtggacgacaagaccatgagcgagatcatccaaaacgagcccttcctacccatgcccgacgacgaggcctcggccggcatggctccgctggcacaaccgatcgtgctcttcgagcccgataacgtggtccgtgcgcccgggccaccgcgctcgagaccgctaagatcggccccgtcgccgtggaacccgccgcggggcgtagagcccaatgccgattccaattcggtcgatgttcaggggcaaccaccgcccaagcggccacgctttgcggagcaaagtcaggtgataagtgtgggtgaggctcctgcgccgcagcagcccgtgctcggggttaattcggcttctggggctggggttgctgtgtggccttggccgactagcgttgcgaatcctgcggcggttaactgggatggttttggagcgtctgatccggtgcaatttgtaccgatgggctctgtggtagattcgacggggaacggggttgatacgcgagcctccttgttcgggccgttcgggccgtgatgtgatatgtgtcattgtactttacgttctagcgctgttttttgctccatacccatttagttatagaatatcagcttattcaagtcaagagaaaagaattagttcatgccaagtacaatggagcagactaagggggtctacgagtaggatgtatcgcaaacaatgggattcggtctacttgaattttataggctactccaagacgtgatgatcaaagttatgcagagaaagtcgtctgcacaatttgagcttctgcgcgccttttactaccgtcgagctatgaaaatgagaaaggacgagaagatatctaaaaaaagacacggcaagacaagaccgcataggctgactcctcgtgctactataaatagggaaataattactccacaagaacgacatatcaaaagcatggtatgatcaaaggtaaaaatatcttattagagctagctacctacgaactgctgcgacatgtcaccctcgaattcccctagtcaagacctaactttaaacaacatgccatccttcggccactagatcatcaatattatcactaagactaaaacaattcgccccatcaaagagatggaagaaacctgtaactccaccattatcgcagctaaatcggtgccccgcagatagcttcgttcatacccacttccaacataacattcctgaagattatgattgctattgccactgttcagaagaaattcgagtactaactaggcttctgaaacaaggtgaagctattattacttataccaagtgaactaaagcccccactttcaggctcagatacatacttgccatatcaagtagttatatattttcgtttaatatctagactttttgttaatctattatactattctagtaagcttgatactaaccgaatctagtgtaattgaactagtcttgtaatattctaatcgtttgataccccgccggtagcttcctaataacaaggtggcaaggtaaaatgggatgaaactggagaaaagatgtgctttcctgaccagccgagtcagtcgatagtggtgttcagaatgagtttaagctatcttcctaaagttgctgcttaaagcatatacatggagtcgagactcctatctccttccaagccatttgatgtagcaccctcagcaagaagcttcttcttcttcatatttctgcgcctaagcagataccagcatgctgtgtagaggagcccagcgacacacgtcaaaccagcagagaccgcattaccctggatatatcgaggcttttgtgtgctagggtatagttgcgatgataccatagaagaaatatcagccatggtatataccattggcatggaaattgcacgtttggaatccggcgcaaaggtattagttgcccaggtgacagcgagcgtagaaatcggatagaggcctacaccagggattagaaatgggtatcaagagacagagctgactagagcctgcttaccaaggacgagaataaacattcccgcgtagccagcgccggaagacgatgttcccacacaaatcaggtaaccgacagcaaccggaacacagcagcctatgatgaataggcttcgtcgcttgagcttatcagaaaagtagacctgtgtcaaaagagagatggcaccaaggacatagacaggaatggtcatatagttagcctggagggaggtgtatctaattcagtcagcaaggtgctcaaatatctcgttcgatataggtacttacccgaggccattgataatagaaggcaggaagacaccgaagccattgattgcgacagatgaagtgaagaaagctatgcccaggaagtaaacaaatggatctttcagtgattccctagcccacttccagtcaaactttgcttcacctcggagcacatagtctcgctccctcttcagacgcatagtctccttctcttcctcgttaagataccatgctgtttcggccgaatcagggatgaagatccaaccaattccaccaatgaatatagtaaagcagaactcaacaatgaatagccatctccaagcggcaaggcctcttcgagttcccatagtttgaattccataggcaaaaaggccaccaaaagcgccagcaatgcactgagcgaggttggttgtcatgatacgctttcctgcttgttctttagggtagattgtcgagtagacgaaagcaaatccgggagacagaccgccttcgcaggcgcacagaatcatacggacggcaatagcttgaccatatgtatggataaaggcagtgccgagggtgcagatactccacaagaggaatgcagtaccgagtgccttcctggcaccaaaacgtctaacaaccagggtccaagggagctcgccggcaaaactgcaaaagctggatagagtttggatattattgaattggttgcccacaagacctaagtcttgctcaaagccgaagataacagcatttccgatctagtgaatggttagacatgaatagtttgtcaccacaccaagaattcttacgttgtttcggtccagggcggacaggataataaagatgagggaaactggtacaaggtatttgtcgaattttcttcgtgcggctgcttctttctggggatcaatgtagatagttgagctagcctcattagaccgagccgcaatgctgacctcagtgtcgatgactgtggtctttgtatcttcagtctttatatcaaagtccattgggacggcttgtactggggataggttctgcaggaagtcagatgcctctggagggaagacgatcatgaacttccagtggcgtcactatatactccatgctcagatactcatactgccagttcaacgtatacgccggaagacatggacgattgttgtctcggtcatggtgatattcgataaatgctgacataatctgaaccttgatatctcgataagcttgaaaatgataagacgcgcgatcggacatagccgaatagagattatcgcaaccaccctggggtaagtcggctttctccgatggagcattcaaattcatattgccttcgtaacctaccatgaaaccccgtccaggccatgccagcagctattctccatatcatttgttgatcccgattctcatctagaatgtcgcaaatgcaatcgtcattgcctccggccgaaaggctagcgaaaggaaaaggagcaactgcttgtctgaggtaggtgacccaatatcgttcgtatggtagatgattcggggctaaactaattcttagatgtcgtcggagaaagcagaaggtagccatactgtttgccctcggccgacaatctgattgctgacaatttgttgaacagtgtgatttgaggcatccgagttgctccaactgcgaaggcgcaggtgtcccatgcatgacatatcactcacagaataaatccacggtgagtctttctaataagagctataatattaccgcacttaactgacatacttgaaggttcctcgtaactatgtgtcggagctagaggcagaggtcgagaagttgactcggcagaaccgcgaactgagagcacgagcccagtctgcttcggttaatgatgagatgactaccccacgcgacaacctctccccgggaagtctggccgcgtctgatgcaagttcaaatcatgtgcaaaacttggtgaagagcgtcagtgatgttgttgtcgagccgtcaaggcagccacgattcttaggacagagcggcggcatcacccttgccaagttggtcatatcagcaatccgcgtcgaggccttgacctctcccctgtttattgagccacgctcgtataatcattcgtcgtcctcgatggcagccgaggcttctcttccaccgcgtcatgctgcagaccacctggttgatgtctacttccagtaccaaacgccccatttacccattgtgaagcgttcaagagttgaggaggccatagaaagcgcataccaagccgcgagtggccgggaccttccggaccgagcagtagaaacggatattttcatgtcttttatgatcttcgctatcgccctctgtgacgtttcaaacccatctggaggtcgaccaagccagagtgaggggtgcttcaaatcagccctcagtttgtacgaaaaggtcgttacgagtttggaaagtgatatcgagactctgcgcactatccttctgttggctcaatttattgcattgtgcccttcccgagggagtctatggcatctgaccggtatcgctttacgcttatgtattgacataggcttacattgggaaagcgaagatcaggctacgagtgtggatcccgctgtattatacgatcaccgacgtctctggtactctacatatcaatttgaccgtatattatgcatcacgctcggtcggccctttggtatcatcgacgaaagcatgcgtgtgccacttccaaatccatgggctgtctatcaaggagcatctagcagcgaatccaccggatttgatatctacagccaacgagctcataaccacatgtttagcttatcgatgcttgagtctgagatcaaacatgtgcaacacagccaagtttgggctccgaaaatagcctaccctagggcaaactatgcagtgtggcttcaagatatccaaccccgtcttgaagaatggtacgccactattccgcagactaccaaggctcacccatcatccatatttgcatatcaggcgtattgggactatctatataacaacgcagttatcctgctttaccggcccaattctaccggatcacaaacctccccggaagcaacagtcctctcttttaaagcctcttgtcaacttataggaagtatcaaaaccctacaacgagaagggaaggttgatatactctggaaatcggcccatcatctctttatggctggcctgggggtgatatacagcctttggcagtcgaaagaagtgcgagaccggaatccgattgggagtagcatttccgcgctgcaatcctgcgcctcgacacttgctgcaatggctgagagcttcccgggggtctcaggctgccgtgatgcttttgatactctatcggaagcaacagtcgattggctagttaataataatgctgcggaactacaccatggccgtcaagagttcgagaaacaagcagaggacgtcctgcaccggctacagccttctcgcagagcacatgactgtaatggaatggatatgtcaggcatgttgtcggctgatagctttgttttcagcgagatgttcagtagtgctgctcaatggcctgagcctcagcacagcgggtttaatgacatgggctttgacccaattgcaagaggaggatctcatatttccttgtaatactttcttaggctagaaaatcgatctaatgaatagctatgactaacgacgtttcttccaatgtaatatacatcctttggcgaattacacttcgctttacatgacggtagcttcatgctcaagtagacgattcaagaattgtcttctaggtgatacgactgtttggactatgcagtaagttcgacctgtgcgtaatccattggactcacagagattggaggagcgatgcataattgcttctgtgtatcgagaacctctggagtaagtgttgcagtttccaggtaatacacgctccagggggcgtctccttgtgtgactatctgcatagcaattcacatcagggtggcccgctcgctcggaacttacgttatttagttaaccttcctctcatgcagaaataatgaccatgatcggagatttccgacggagatttggcgcttatatgctaatcagtataccaatcacagccagtaactttttcggagaaaagcgatgctgccctactactgtggagtagatagatagacagcttcgttgggaagagaatttgcagacatgtgatgactgtatcgctcctctttccaatctacataggcaaattacttgagtatatagctacccctaccagttgaataaggctctcttggccactattcttctatacggagaaaattcatcatggctactagggagtcaattaaactctttaccaatcgaaactgcccatgtatgctctccgagtccatttttgctgcagaatactgacaatgactcgcaggggcacaccgtgttcatattgtgctggcagagctgggtctaccattcgaggaggagatcattgactacagcaaacctaggcagcccgagtatctcaagatcaaccctcgtggacaagttcccacattgacatatggcgaccatatcatattcgagtcagcttttatcgcacagtttctagctgactcagtcacatcaacgcacttgactccacgcactggagaagcccaaggagccctcatacgccacagaatcgccttctttgtcgaaacatacttttcaaaggccaatatctactactaccgggcaatcgaagccaaaactgatgaggatgccgatgagctcggcaagcggtatgttgatgccgtcgtcaaagaggtcgagccactcttgcaagacgcgaaacccttctttggtggcagtgacaagctgactatggccgaggtaattactctccaacccttttgaaacttcgtgtttggttatttccccaggcaaccgagatttggaaaagctgaaacggcttgtaggttctgactgcttcctttatcctgcggatttccacgctgccgcataccgaaaatgcgccgttgccaaataccatggtagctggcatggaagaaaaggcgccaaaattcttcgcgtgggcccaggctgccatgaagcatccgtctgtgaacggtatctataacaaagacggttgtgcggccgagatgcgtgatcgacgagctaaagctcgtggtttggtatgattcaattgctgtttgtcttgaaaaggctgttctgcaaagttttgcaccagccaagatacagaaaagtgttctgtacaggctattccgccatcctgctatggattcaattaaaacaaatattgcagaaccaactgttaattctacactctgtccctaattaatttctttgatttgaaaaagtagaacacaccgcatcgctaggaaaagcaaaaatgtacctctgattggccacattcacttggaatacaagtggttttcagataaccaacatgttcccattgtcgaatttcgagcctcccagcactgattgaactttgggttttctttaatgagtacctcgttacgcagtacgtggaaaggggataaatatggatttcgcgcgatggtcttcagtgtcactgtgctaggaggattcatattcgttttagaagcgtattattcaatgttcacagctaggtgctttttatccccatgctagataaattcattggtatgtatacccatatcaacggcgttgagtcctttaaaatttcgagatgttgatctgaaccaggaactcaggtttgtgctgacctgaatgaatcgagttgaacagatttctacttcctacgggtctatatagcatgatagcatgtgagcagtatgacataaagaccaaatttcattgtaataccactatgctagaagcttctagcatagacacttgctcaaagaataaagaagcacaaagaagacattcgctgatcaaaggctgtacatggtgtcaaggctcatatcgccttcaagcccatttgtagtcgctccctcggcaagaagcttcgccttcttttgatttctgcgtttgagaagaacccagcatgaggcatacagaaatccagcaaccactgtcaaaccagcagagacagcgttgccagttatataccttgggccctgctgactggggtatagttgggaagaaaccagtgaagagagatttgctatagaatatgcgatgggcattccaattgcgcgcttggagtctggctggagattgatagatatccatgttacagcaagggtggaaattggatagagtcctagacaaagtttaggtttagacttcgagtaaacatctgcaacaggctagatcacacttacctaagacgagaatgaacattcctgtataaccagcagcaccacttgctgaaccgacacagataagatatccaattacgactggaacacagcatccgatgataaaaacaccccgtcggctgattctgtcagaaaagtacacctgaataacaagtgatatcaggccaagaacgtaaactgggatagttaggtagttgaccgaaagagaagggaatccaagcccagaaagaatagtgggtaggaaaacgttgaatccgttgatagaaaccgatgaggtaaagaaagcgataccaagaaggtagacaaaagggtctgtgagagcgatcttgatccactttcgttcgaatttctcttctcccctgcgcaaaaagtctcgatctctcttaagacgcattatttctttttcctcgtcattcaaaaaccacgctgtttcagctgttttcgggagacaaagtaagccgagggcgccaacaaaaatcgtaacgcagaattcaacgataaatagccatctccaggctgcgagaccacgttgagttcccatggtctgcacagcatatgcaaaaagcccaccaaaggcacctgagatacacattgcaagattggtcgacatgatacgctttcctatcaagcttggcgggtagatagtagaaaaaaggtaggcgaagctttgagcaagacctgcttcaaaggaattcaatagcatgcgaacggctatagcctggtggtaagtttggataaaagcagttccaagagtgcagaagctccacaggatcaatgctgctcccagaggcttattagcaccgaaacgcttgacagctaaaacccaaggcacttcgaaaacgatggtgcaaacattggccagcagtgtgatattgccaaattgaccatccttgagtccgatatctttatcgaagccaaatactctagcattacccatctggtaaatattagagagtgtactgttactccgaactgaggctttactcacattgttctggtccaatgaggagagaactaggaagacaaccgagaccggaaggacaaatttatcaaatttcttcaacacagctgcctctttctcagggtcgatatatatttccgataaaatctcgccgacttcatggttgatctcttctggggtcttcgcatcaccctggagggaattcttgtcggattccggagacgacatagcaaatatttgcggcaagtcacgagtgggaagttcaaaatattttctctttgatcaagaaggagcaagatgtccatgggttcttccagttgtatacctaaataatatatatctgtgtactgtgatatagatacgtcgatctggttaagataaggatcctgcaacctcggcagctagtctcgagacgccaccggactaatccgactctctcaggacgaaaaagatcatgagatcaaagatatatgctaggtatatgtatctaactcaatctaagatttaggtatttgttgggataatgatatgacaaccgaaattccttgcaaagcaaggtcacgtgaatcaggtacttgcgaactaacatgaataggagactttacacatcttcaatgtcatcacatcatctataccataggggataatctctgatggataataaaagcttaacgacattatataggcatcggacctttttcgtatccctttataatccgatcggcttattcctcggcttatgccgatcgactcgttaatctgcattggattagtccgaatcgggtttgcatcatgatgcaaaacctccaacagcaaaggtcttgccatcgggaggtacttaaccttgggtgaactgctgtcattctcaaatacatccttttctcaactacaatctcttttgcctggctcacttttaaagttgctaagaatccatcatgcagccattcaatcttactgctactgggcacaacctaaactatctccctgaatatatcgcacgtcgacatggatttttcgaggagcaaggactcgatgtcaaagtttctattcccaacccatgggacggcgtccttgatgcactcgctgatggcacagccgacatggctcttggtggcatttgggtgccggcaatgtaccgcaaccgggtgaaagactacacggtctttgcacaaattgcgaatcgctgccctcttgccctgctctgtcgtagcccggcaaaagacttcaagatcgcggatgtggctggaaagacagttttgatgaagggtatcggcggagccagcgccggtctattcttcaaaatgtttttacgcgagaacaaggttgaccaccgatctgtcgattatatccaggatctcgatgggaagatgctgggcgagttgtttgaagggggaatgggcgactatttcgtgacggacaacctctcggccaaggcgatgagtgagcggaatcccaaaatctccgttgcgatgcaaatggtctcgcaaggtgaaattccatggagtgtatactaccaggagaccgcgaccatcacgcccgagggccttgatgcacagaggcggttctgcttaggcctccgtaagggtatcgaatgggttctggaacatgacgcagaatcatacaaggacgagctcgtcgaactcttccccaatatcccagttgatgtcgctgttgctgtgaccaattctttccgtcgcgatggcatgtggacgacaccaatcattccgcgccctgcttttgaccgttggcagctgggacttgccgaagctcagctacttgaggagcccttcttatacgaaaatctggtcaatgatgggcctgcagtgaaggctcagagtgagatgatttccttctcatgaatctaaaatggaagtctttgataatttaagactcctaagttgtctcatcttgggactggttttcgtacataagattttttgaatgtgaaatattttgaaatgaaagtattcttagaagacgagcatttatcaggtcgaaaataagatgaggaggttcatgatagatcctcgtggaaaattctagattttcgctagagagtaacgccgagttggtaaattctgctactttgaagctctgggttgttgattcagtgagctcaaagcagaaatttagtgatcgcaccgatcctacgtaagttgttttgagaatacgtttaatacttgaatacacgtaaaagcaaataagtaagacagatgttttgggaagataagaagagaaatgtcctttgtcggaataagccttaaaacattaggaactaaccttgaaactaggtgtaccacctcgcctaggtactgcccaggtgttctcttcattaaatgccacgatgcctagaagtgtgaaaggatgattttctagatctttgttggtattgtttcccgcatcatggatgtaacactgtctaaagctaagtatactagcgtattcatttttcactgctgttcatgcttatgcgtagcgtaaagtatatagtccgagacaaaatctactcatgcagttggaatagtgacataagatttcagtgatcacgattatatgtaagtccacctactggttctgtatgttctttaagtcttttcatatgtatacaaagtagtaaaaagcatagttaaaccgcaggacttccatgtatagccccgaggtaacctgagctatgaggtcagcgataagagataagcttttcctacaacacccctcacccgcatggaaggctctcaattctccaattcccccgaaattaccaagcgaaaaaaatgagcaagccagccgacgggaaagccgtgataatagggatctccgggccctcgagcagtggcaagacaaccctggcgcggctactgcagcgagtattctgcggggtgaatctcaagcccaaggacacccatctaaacacgttcataatccacgaagacgatttctacttcccggacgacaagtatgtacacctttacttccttctcaatacacatacccatcttaagtgaaaacaaccctccaaccccatcctaacccaccccagaatcccctacacaaccacccgcaccggcgcaaaaatccaagactgggacacagctgccgcaatcgacatccccttcctctcgcaagcactccactacgtgcgcgaaaacggcacactcccgccgcgcctccggagcaaggaagaccagaactaccagacgcattccggcgtgtcggacgaggtcgtgcagaagttgcgggacgaggttgatgcgcggttgcgcggggaagcagcagcggacagcacggcgaacccgacggtttcgttcttagaggggtttttgctgtttgcgccgcctgggcaggaacggcacgtgcttcgttctgttagtgatgctattcatcttcggctctttttgccggcgccgtatgagcttgttaaggcgaggcgcgaggggaggaatgggtatgtgactgttgggccggcgccgcaaccgccagttcatactcatgatactgcgggtgcgggtgcgggtggggaaggggcggggggaaagacgaggacggaggttgatcttgatgctgaggatgatcggccaccgcagaatttctgggtcgatccgcctgggtatgtggatgatattgtttggccgcagtatgtgatagatcattcttggttgttgattgccgaggatggagataaagaggagaagggtgagagcaaggatcaagagaaggctgatcttgttcggagggttggggatgggactagggctaggactgatgttggggtcgaggttgcgccgggatatgggagggaaggaatggatgttgttttaaggtgggctgtcgagctgattctgggatattatttagatcagacgtaggtatagagttatatacatgaactagagtaatatatttctgttgtctcttagctgcagtgattgcctccttcgtagctatactaagctaccttatcaaagattgattcgcaattagccctcgccatctgacaagacagtgtggcgcgtttcagaggttaaatgctcactacataaggataatcggggtaagtagtgataattcgaggtcaaacatggtatggcaataccaccgttgttgaggtcattcaactcaacaaggtaatagtatctccagttcgctcaagattaggcttcagtaaacaggctaccaaattcctctatagacagatacaggacacaacgagtaaaatggatgttagaggctttaagtttctttgttctcgattatccctctatacactacatcacaaccaatacgtaagaatgtatcatatactcttccctaattaggtatgcctttaaacctagttctgcctctattctagatgccgaaaacaataaaaaaataaaaataaaaaattctctagtcatatgggccgaggtgcccgaggtattgcaagcagttgagagtatatcaggattacaagtcgacaacgttattcgggaggattggttccatcttgataccgaggatgatctccgggtccatccgcctaggtatgtggatgacgtttttgaccgcggtacgcgacggatcatctatccatgggtgcttggttggtggttactaagggtcagaggatccatggataagaagagctggatccagggtctagcggagactaagcttattcggatggttaaggttaagactgatgttactactcagatggagtaaatataactacgtatacagtggatcatcaatagataattgtctttatgtttgctatctgctaacggcagcgaggctgcacctgattctgcggtttcccatcatgtcccggtattctcccgttaacgatactgaaccatcccatcgtcgaaatttactcccgcgcaattggtcctcgccatccaagaatgtaatcaatgcggtctctcagagaaattggggtgacctcggcaggtgtggtattgacatgctgctgaacttcaggttgaatgggctcaagctgaagatttgactctgccaggacagtctccgtctcttgcaccacatcagcattggtagtaagatttcctgcgtagttcactgggccatagacatgcgcttcgcgggagacatggctgagcaaaaagtacgacgaggagatgatgtggacagacgccaggaaaacaagcaattgaaaaaagaaattaatcagggtccataaggtccacagaccgcgtacacggcgtgacttcgttcgctcagcgactagagtctcgaaaactgtcgatacaggagctggagtttccgcaacggtttgcgtacttgtagacctcgaagctggaattttaccaaatagaggctcagtcagtccaaacttgggaatggaaccatcttggagatatggtggagttatctcgacgtcgagcttagaatggttaagcccgggaacacagatatctcccaattgaccacatgaaacttcgcacctagtatcagcattctgatactttgaaggtacagcttcctgcttggtcaattcataaccaggggcataaatggcataatcttcttggagaacagtttcagcatcactgcagctgagcgtggtcttgatccatggcaaccaggtgacagccttgcctcgtggcagcttgatttcccacgacaccgtgaacatgtccagagcttgagggatgctgacaatattgatgcgcgagattccagtcccatctgccgctggcagctgaatagaattgatcagaggctttttagatgtaaaaacagcgtcaaactcgccgtccgggccgccatgcacaaaaatgcagaatttgcactgctcggcccagaagttatgattgatgagatcgatggagcaagcagcgttgtatttgatcagataggacgatgggtcgccagcctctgccacttcggcccgtatgagtgtgttgactttgtggtccttgagttgtccgaagcattctgcatcgcacttccggaacggaatgacgaggtttcttccaccgtagaactgggccatcaagcagctttccacgagcgtatgtcttttaaaagacgaggtcatgaattccattccctgacccgggggtgttcggaagtagagataaccagactcggactgggcaagtcgaggcagtccactaacgaccaactcccaccaatcccacggtttccctttctgtagcctgaccgtgagcgaaatcgcgatttggtatgttgcagggtagatattgggaggggtttgcaggtaaagaatgtcattgtccaatacgatcttgggcttgtgcttttcggcaatttctgcagccgtctggggcagagggagtccatgacatgagaaaaatgatgccgatccgatggattcaagaggaaaaaacaaggtctcaatttctttgtcactttcttcggtgtcagaaatgcttccgtggcacacacaagtagaaagtgtatcataattccgctgaagcaagttctcttcggtaagcggctcggtgccgctcaagtcagtcgtgctgagaggagtttctgcattgcaccaaggagagttttcatcgggctccggtacatttccaaccgccgctgcattgccgtttcgcgagagatgttccgatgcaacgttcggggaacctggcccatgactcggccccgagtcttgaggcaacggcatgttctccagcaccacgctggattcgtccggagtagcagaacgcctgtgagtacgagtggagttggcggtgttctcgatggtgctcggcaggtcgatgttgttcatcataagtttgcgtcgggtgccttggtactcatcgtcaggaggaatcgagtcaggcagagaagcagccttggcagatctcttccgaggtatcgcagagctcgggctacccaggctgttgacctgactcttggaaaggtcagagagggttgagctatccgagctatcgacccgagtgtgcatccccgagatattatcagtacgacgagagatacgccgagaatcatcatcccgcgaaccatcgtgaacaacgacgctcccaaaatcagaagcagagatattatcggtagggtatctctcggtctcatcagcatattcttggccaaaccgccaagcctctttctcaggtggagtgtcggtttcatagtgggattgggcttcaggcttcaactcgatgacccaagacgggcttttggtggtgtttggcgactggacattgagaattggtagattcaggtttggacggccgcaggtttgtagcttaattcatttcagatgacagtcagtactgagacccaacttgagggttggtttttcagcgttacctccatggagatcgtgatagacactggctcttctggaatgccactccagtcgcaccacacatcgaggttgctgagagggctgtcgttggggttcatggtgacgtccatggtaggctccatgagatgaaatggagatgaaatggggatgatgaggaaatgagaaagggaagatacacgagaggaaatatgatgaaaaacaaaaggatagggagtagagtagggagtagagaagtgaagagggagagggagtggaaggtagcaaacattaggaaggcacgtcaagatagttaaccatcccaagtgatgggtttatgcttattcgtatcaagttccacaacatccctactgtctatcatcttggaaagatcagatcatcaaagtcttacatcgtcaattaaaaaaaaaaacacgagaagcagcacttgcaattagccagtgatactgcttttaagggcctgtatatacaagaagggcttaagaataatctcacttttctcccaatcccatgaaagaaagacctcccccttttatccgccagcgcctgtaaaaataaaaacctttagccacccagttaaagcatcaagcataaaaaagagaataatgaaacagtcctcccggtctatcaagacagaaggaaaaaaaaaaagaaaagataatatcaagccagaacgtcgagaacgtcaagcaaatcattggggcgttccattcggggaatcggggtgatcgaaggtggctgggccggccacggagccaaatcgatcgccgtcaaccatttgagatggaagaataggggtattcgcctggttttggtcgaaataagcgcgtgtggatccattggttccttggggatagtcgcgattccgctgtagaggaggaagtatagacgagctagggggtaagccagttcggacatatccctgagccatcatccctgtcgaatccggggtctgtctcgggtccaaaatccttagctgggtattctattccactctcactggttcgcagaggggtgtcgtacaggagtaccaggctggttcatcgccatcagttgtcccacagcggcctgctgctgctgggtggatcggctttgaccggtaggatcgggaatctgggacatgggggctgcttgcatgccggctgatgattgcattcccgggtacatctatccaaggtcagctcaaagagcttccaactgccaggggggggatacgaaccgccgcataatcaggcaccacctgtcctgtggagtaggtctgcatggcggcaggcgtttggtaggtagctggctggccagcgtacatagcagccgttgactggctgtatggatccatttgacgggccattcgaccatccacatcatagatgccctgctgtctgccatagtcgattgaagtacgatgacgcttgactggcggctgctgagcgtagtacccataatctcgggccgtcggcggatagcctccataactagatgatggaggaatctgcaccgactgacgctccggagatcgagtagggactggtggatgaaagtcgtcaggtcttgtcgatcgtttcctgcggctgttaactacaagctttcacattcctatgagttgagggacgtacaacatggtgcgaggctctttgcgaatgcgcaatttcacaccttgatccgcaaatgatcgggagaggtgggttgactccatcattccagggaaactcttgggaggggatactgcaagcttgtcagaacctgggttccagctctctccacgggagattcgtacctgtgaacctttctgagataacggtcttcaaataagacacacggtccctgtttgcttgttaatttgaatctggaccaagctcccgaccgttactcactttcgcatctcgaacaaggtaaacttcaggcgaaagtcgccctcaatcttgaccgagagatctccaaagacgaaaaagccgccatctacaaactcgtcagtgaattagccccactcgaaggccagcctgaactaaccgctgttgtccacatccttcaaccggtgaagtgacgaaactagggttcctgctaatgcagtcgacggtgcgacgggtacaggacgctcttctgttgagtcgtacagactgcagcacatgaagtagtacgggctttgcaggtaatgtctgcgccaaaagtcagccagccgcgcgaaagccacggtgaattgcacacttactgtgcgaggtaggtgccctcctctcgcacccggagctggacgatcgggggcggatcgataggtttgcgctctgcaagcgtgattagagtcgggttttcggccagttccgtgggcctccgctttacagaggactagctaggactaggaacgagaaagaaagaaagaaaagagcttccatacctttttccttgccccccgccacgcgggcccggttgggctgctggcgaatgatcaagtcaaagtcagaactggtgttgttcaacattgtcagtgggattccctggacgaccgcgtaagagttacgaccctgtcaaagtagacacgggaagaacgactcacccctgagcttcgcgcgagagagaggcgtcggagaatgtcgcactcatcaagacgagtcacggacaaacaagggaaggtggagagaacccccgaattttgaggttgctttgagagcgagtgaaccagccgatacgcagtgtcgatcctcgggaatacaaagaccaggagcaagtgatctgtggttttacaagggaaagagtgggaaaggaagggaaggaacgggtctttggaccgacagaaatccagtggtcagcgaagataaggagcgaagagaaaccctggacgagtcacgatgtcgtcggagaggggtggcagctgtagtggggtaatgggatttttttttccgtttcctcagccttcaaccatggacgagcagacaaatgaaggacgttggagaatagagagagtgaggttggttgaaggacggatgaggttgaagacgaaaacggagtggtgtcgtcagtttgcaagcggaaagagccaaccgagcgcggttccagacaaaaaccttaagcggctctctctcttgatggtataacggcgccccgagaactgtcgatatgccgaccgaaattggacgcgcgagaatttcgcagtaaattggggggagggaaaaaaattcattcaaattcagaaaaaaattcaaaaaaatcaattggatcacagccttccaactctctcagttgtgaacaaatcagagtcgagaatcccacaaaaaaggaaaaaatcgacgaaccccgtgggattcagctggttttgtttaaaagaaatccgaaaaaagggagaaaaaaaagggaaatgcaaagatacccagatattctaccaccgtagcaatatcttccaagggaaaagacctgagaagaccggaggtgataaagtccaagtgtgactgcctgcctggaggggaaaggaaaaaccaaaagaagaaatggaaaaagaaaaagaataaaaaaaagaatcgaaaaagaaaaagaaaagaaaaaagaaaaaaacaatttagcccggagaaggcagaaaagtggaaatagaattcagccaacccacggttgggcgaatggcgatccggatgcgtagtaaaccgctgcctctcttctcgttctcgttggtccgacagagaaacggcgaaccgctagtccgttagtccgcgtctgggttctttatgatcgtacaaaaaacccacaaggttggcgccggatatgcaggtgatcagacccggttttcttgtccgccgtaaaggtgttggtctaaacgccaggtggactcgggccctggtccggcgtctaagcattccagtcaaaagtggagatatgcacgatcaagccgcatcgcctatgtccggggattgctgctgcgtctccactcgatctcagtcctggaatcattagccatgttcgaataatatcaggacacctttcgaagcccacgaactgccccagctcggatatcgctgccgcttgtcaacgaaggttctaaccatggttgggcagcctttcttatgtcatcccgaaccaaagaatgtcaggccctagacctcccacaaatcgcttggacacccccctaaacaaacaaaaaaatggaagaaaccataccttttttcgtgccctgaatgctcctttcagtgagaaatccaatactcgaagatcgcgcgtgaattctttggtgttgtgcgtggatcactggtccctggaagacgcgaaggggctcagggcgaaaggagtcagtccgcgcgcgttcgacgactcaggtccggcacagtcacaaattgcgcaaatgatcgagatcccagtcacaatagcgtgtggcacgtcgtaaaccccgagagcgacggtcgaacactggtcgaacaccttattccgatccgagacgaagcgacacatgccgagtcatgatgcagtggaaagcgaggagaaagagttgagtcgaggagcgaaaaggaagaaccacgaggcagcgccggagcaagactgggacaagacgttttaagggggcaacaacggatcaccgcacagggcttgccccgtgatgcgtcacatttcctgacaggcccaagatctcatgtctcatgcaagctactgtatgtcgactgcagttgggggcgtagacgctggttggttccggaaatccctcggtcgagctataggccggggcagcgcatcagccaatgcaaaaacacaccgaaaactgggttgcagtcttgtggcttgcggcttgcgacttgcagcttgcagatcgcgtgtttgcgtgataaaaataaaccggtactttctagtatggactacggtgctctgcgccacactcgctgaccctcgatttgcggctgaggatgtacggtacttttccccctcttcagacatcttccaggtgagtttggcatcggtaatgcacaagtggatcccagatcctaaggcattagttgctgtatcttgccgagaacttgcattccacactctcataccggaccgcttcttccttatccttttctcagcatatgcaaaaaaaaaaatctcaaatcctagcttgcatgcagatattctcgagtcctgggagtggcatcacggcgcttgccagcatgtgatacggagagctgcaggtgcagttggccatgacaaccattcctgtcacagtccacctatctccgcatcatccgagctctgatagcaacgatcatatgtaagggtgagaacagcaagactcaattcgatcagagggcgccgatcagctcgacaaaagtccggccccaacattgaatcatgcagccagcgtgagatcgttattagcgagtcacttgactggagcagatgggacccgctgtgggggtttccgacagcactcagctcccgagaacagcgtctgcgattcgcttaactgatagttcccacggacaaaaagggggaagtcgaataaggagggggtaaaaaagtaaaatgaggggtggaaaggcgggaaaacacgcccagggtaccggcattgtttgctctggctggggttgaactgttggttcttatgcattgccttacaccccggcgacaagttcctgggaatgcagtcgataggcccgaaaaaaaaactcgcagccctagatgcatatcatgatgcgacaagcaagccgcgctgggagcacgacctgtcacttccttttgacttccgggattcggctccggggccaggacagaagtcccaactctcgatctcggtcatggcggggaaagccaccatttcatctgctgcagagacatgattcaggtgaaaaccagcatgactcatcaagaccgataggaataattgggcgaagggttggccgtgacattggtgctaacaagtcgggagacacgaagagagaaaagagaaaagaaagaaaagaaagttcgagtgcgaaaaagcgaaaaaaattaaaaaagtgaccgccaaaaaggaagcgaatttttcgattttttttccttttcccaatttaaaagtacagcgcacaccctgacccaaatccacagcggccccgactgaaaaaaaaaccccccgggaatttgtcagtgtcgggatccaagctagttaacttacagactccggttaataaaaggacgaaaagaagctcaaaacgggacccgtggagatccaatccacaaaaaagaccaagtagcaacgaacccctgttcggtacttcaacaacacgaggtacggagtgtgccgtgagggaaagggaagaagggagggggggggttgccgcgatggagcactaaccaaccaactacaacatacatacggagtactcaagacggtaactgtacggagacgggagaaggggaaaaattccagattcacgcagacagacgaagaacctcacggtgaacaggtaatatatctgacagcggcattctccattgggatccagtggttaggcgctactgtgtttatgcttaaatgttggccctgcgatggttccgtggtggttgggcggtggttccatggttgtgttccctccctgacagctgtccggtccgtgttggcgccgtggccgccgatcttttgtcgatcggtgctttgtcgggactatacttattacttactatattattgcactgagatagttatcttgtattcctctttatattttgaatatatccttcaagatgctactactagtagttaattggttattacctgcgctctgtattggtcccaccgttcaccggtatggcctgaaatcctcccgtggtgggatactcgataactagattctgcagtgtaaccacgccgggaacccgcacatcagccacagcgttatgcctcgtccctcgtatatagagggggtctgggactacatacaattggctacaagatattatcgaggctatcaaaaatattttgttaatcttcttcctccaatttcggcatttactacaggtccttcctattcgaaaattttcaaccagcattcctgcgacaggactcttattcttggatatatcatgtgccaggcacatctactccgtatgtacactagagcaaagagctacccagtatttgatacattgacatgagacatgctaatcacacactgtactcattcatcgcagctagatagaaagtagaaaagaaacacccaagcaaaaaaactccagacaccctgctccgtgctggatgaaatccctcgaaaatggactagtaaatgagccagagaggaccgaagagtgccgcatgacactcatttcgtccccggacacccacttaacataacgtagcctttgaacaagaaaagaaatggaggaaaaaaaaatattaaatcgaacggtaggacaatgcagttcccggaaacacgtggaaaaaaaagagaagggagaaataagggaatcggaaatttcgttagaacaaacgccctatccacatgcgtaacttgctttgcaggcaaaaaaaaccacgaatcgtcagcttcaagattatcatgtctgcatcacgacatccccatccacttcgtactcggcgtcaatatctgcatctgcatctgcgtctgaatctgcgtcggtgccattggtagtgggcatggccttttggccctcacctttggaagcagactctagctcggcgggaaccataacgtggattttctcgaccaaagccttccggactgatcgcggtgtcttggggttatcgctggatcggcgggagactgctgttccaggcgaccgcgagatggagttagttttctcgggggtactaggtgcttccgtatcgtcattggacggctcggtagcatcaatgccattcgtcttgacaggttccttgggagcagcatttccattaacatgctccggttctttttcggtaccttcttcgagtacaggagccgtgtccttggcatcctcatcaacgacagtttcttcctcgacaactccgctctgttccgttccatgaccattcgcctgggtagatgttgcttcagctgcgggagagtccgtgagaatagagcttctcccacgacgagtgctgcctccgggggtgaccattgccagcccggagggtcgccgaggtgtgccgcgaccgccattacgggcagccgtgggtgtcattgacatgctattgattttggtgctaccagatgggcggccaggtctgcgtttagggggtgctgcaggaggcacaggaggccaaagttcgaaccgggagggtgggattccagcggcggggttggggattgcaggtggttcggggttgaacgcagaatggtgggagccattagcattaggccgcaaagccaatgtggaaggcggtccagcggagtttgcgagagtgtttccaaccgacgcattcatcattcgaatattgcgctcatagtcggtcgctcttgcctcggtctcatcttcatcttcgtccgggtcctctcgaggggcgacggtatgaatgggagcacgatcgaaatgagactgattactacgacccataatgtaaggtgtccagagcagcgcatctggattgagctggacgtagcccttgttttcccagccactgatgacctcgttgtaatatttgtgatcgagacggatggcgtatgtcttggtgatgggatcccgcacgagagctcgaagtccctccagggcggatacgatatcatctgccgtcattcctgtgcgatcagacagatctgcaatgctgacaggcgtcttcaaatcacgaagttggtatgacaaaatcaatcgccaatagtttcggtacgacaccagacccatgtcggagagaggcttctcgggcgatccatttttgccttcgatgcgagtaaggaggtatgagaagtcgataaggaggtttccgtagcctttgcgttgatggataggcagagtaagaatgcaggaaacgttattcgctgagcttggacgtttttctttactgaagtagccaacgaaatggcagcccaaatcgtcatactcagtcatgacatagaataagaatggctcaacgtcgtagtaaagagtcttggagcctaggaaaagtttcgcaagaaggcacagattttgacagtacactgggttcttgcgcccatcaacttcgaagattgagatcgattgatctcgataaatctcatcaccgggggggtgcttcgcaggacacttaagtttatggcgccaggcgacgaagtccgagttcatgtatttgagacagaactcgcaaatgtacagaacacggttacggctgtattcctctgggtaaggcgctgcataccaggtttcgatttcatagccaccaaagttgatagacttgatcttggaaggaggaccggaaaccttttgtgatgcatgtgctgtggcctcgccgctgagttctgcttccttcactttctgttgccattcatcttcggctttcagacgcgcctgttcgaatctgtcgcgatcgaattgtgtgggaagtgtcctggatgtatcttgttcgctttcagacagtatgcctccgtatggttttgatttggcgtcgtctgtctcacggtcaaacaaagtcatggagttataggatatggggggaaggggaacgaaatgtgcctggggttctggggccacaggtggcggctttggtgctctcttcttcttgcgttgcggtcggatttgagtgcctgttattttggacatttttgcctcgtccagccggaacccaataatcaattttccaaactgcctagttaccacgcggcagtgctctcggtccactgcgcgagttcgtctcacgcgtacagaacgtgtccgagcaggagattggacatcaccatcagcaatcgcatccccctccaaggccgcatcattcaaaattgggttatcggagcggaaagatgtttgtcgaagtctctttcgaagcacaggtatgtgttcttcggcctcgattgatgaggcctttcgctttcgaagcgatcgcgagctattgagcatctcgtcgtcaacgcctgtgttgaagatagaatggaatccctcgtcgtgtgtgccagcgtgcgcaggcagaagctctttgggaagggccgaggctccgagtgtggtttctgtcgttgtatttattatcgggtcaggctctaaattgttttgaacacagctgggacacctccatgggcctgtgttgatgttagtgcgtgtaaaacatcggagcgggataaagcagagatcgaagagcatgtgtttgcgtaccatccgtttcatcaaatgcttcttgttcccgagcgcattgccgatgggctgttggggtatcgagtcagtgatgattcaaaataaacagataaagggcagggcaagcagcgtaacgtacagtgatcgccacaaacaacacaagtgagccattcctcaaaatcttcgcttggatcgtgttcctcgtcttgactgcaaaccctattggtccgttagtacatctgattatgcgcccagtgcggcgagtccttccacttacaagcagtttgaaccactgcgaatatcagtctcgacgtcctcgcgaccattgctctcagcttcccagtcttcggcttctgattcgtggtcgcttgattctggttctgacgcgtcacgttcatttgcctcaaacccggggtcggcatctgcatcggctgtctcagactccgcatagtcttcttcagaacccgcgtcatcgtcgggtagcttgacagctccaacaggttcagccccatcattgtcatcatcatcttccccgttcaacttgatgctgccgttctttccgtccgcagtttcatccgggccatcctcatcaacttctccagtgtatgctcggtggacggcatcttgaagccgttgatccatttcatacaagtcagtctcttcttctccctccgcatctagatcgctatcggccgggtccacaggcgggtcaagtttgcccgattcatcgttcgctggcggcaccgtcgccgccatagtgaaagttaccgccaccgccaggttgagcacagtagtgcttattgtatgcgctgaggctaactggggtatattttttgtgaaagaagcttagactgatcgaagcaccccgctgacgtcggcgctgatccgggggtgcatctggatcaaaagcgggttcgaggctggctagagtggtaccgaagatatttgcgaacacaagtatcgatcgggattgacgcttaaagttttcaggcgcaaagttgaagctaaacaaacaagaggtgtcagtctgcggctggagtggctaggcatcgcaagcgcgtcgcaaaacagagaaaacttaccccaaaagaaaccagtgcaatatttgatttaaaagcgtaccagacgcgtcaactggcagtccatacaccggggcctgtctcttttacaatcgaatgcgatttgcagcggccttcacgccccttgtcctgtgagtgtcgttgcaacgtgctgagtcagcccaggctaaaccacttcgggcgggggagacctcaagcccgtcgctgtaggaagagacgctcccctccacactctccgcgatcgatctactctcctcagtccgtgagaggctttgtgactcctaattctattttgatagctctttccgattatctacatacccatacaaccgcacaccatgggtgtcccttttgaggctctgattccctatgggattatcatgaccgtacgtaccattggtcaatgcctgccgagactatagctcaccaatcgctacagatgtttggtgtgactggctacggtctccactatgtcaagcgttttgccaacgatggcaagaaggcgcgctggaaccgggacctgtgggatagagtaagtgtttcattctcgtcggctgcggtcgggacttagaggcacattagctaacaatttcacagcaaagtgagtgattatgagactatcggccgacccaaaagcgcctaggaaaatcatatgagactaatagcaaccaacaatagtgatggagagagacctgcgcatcacaggctcattccgtgggcagtccagcaaccaccaagcacccactggatttgaagtcagcaacccttggaaggtacgaataacagatcccctgtccctttggttccaaactccgtgcagaaacgctgacccgagacatagatcgagaatcggatctactagtttcaaaatgcaacctcttttcctttacgttcaatgtctgcgccttccttaccccatgatcatacatatccactgcaatttctctagaaacgtcgttgtaccatatcatttgttctcttgggtttcctagtagtccgctcagtctacttgagctccgaggtcattccccgaataccttggatctcactctcacggagatgcatatcgaaatacttggccagtgcctcgacgcggtcctcttcggtctccagcacctgcaagatctccgtttgcccgcgcaatctcatcttgacttctttacccgacatgatgcactgacctacgatctctgtgccgcttgggcccaaaagcattcgcatgcagacaaagatctgggtgaaccagcttgttcggctctggctggattcgaagttcatgacgctgaaatcctgtggtagaaactccatatcggaaaagcagatctgtggcaaccacttgctctcagggttgtatcttgtttggtaaatccagatcttttggctagagtttgtgaactcagcaatgctttctctgacaatacgcatctcagatggtgcgatagccgtagcagtagcaccttcttgaagtaatagtggagcagtggcacaattgtttccaaagccgacatcaacctatccatatccgttagcatggttcatacactacagtagaccttcataccataccatgtacttctcccctgcgatgatcacaatcagaaccatatgtccacttcggatcaatagtgtcagctctactgggaatactcggaatgctaaaccgtcggagaacttacaatggcagatataatccatcatccactcccttcgccgccgcatgactgactctacctccagtggcgtaaacaagataccccagggaccgcaagacaataaagaagatcccggtgttctccatgcaatatccatccagccggcgctccaccatcttctcaaagagacattccgggttcagagatatagtatgatgctgcgagtaatgcagcgctgaattgccccatgggatggcagtgagatgtcgcctttgcagctcacccagcgcagaaagtgcgtcattctcgatatcctggcggagatgttgaagaagattgccctcggattgggcggaatgggagtatctgattcggttcaagtataactccagctgttgatcggtatatgtgggtttttgtgccattgatggggttccttgttggaatttgtgtgttcaagagatataggaactgtctctggccattgagagtcggaattattcgattctctctcgagaggactagttatgtatgtcattggtattttgatgaccaatagtcttttccccacactttcccgcacatcattgcctccacgcgcagcttatatagtgtctggctgggtttgtgcataattcattttgtaggtgcctacatacacttttcagtgttatccgcctagtcaatctgtatagcttagaatagtgtatatagaaaaagatgacaaggcacattctatacaaatgaacagacataaacgacataactatggatatgcatgagtaattccaacaaatatcgcaatggaaacccgagaccctgtagttacagtactaataaatctaattttgttctgtttctgtacatatgacatgtatattgttccttgataccccatgtttcctgcaggttactgttatcaatcacctcggctatgaccgccgcttgtgaagaacataattatccagacataattaacaaatttgtatataagatatagaaaatagaggatttgattgttactgctctctcaatatcccaagactaagcaatacataggcttgtgaaacgtacctttacacgctccgagtataaatctccgatgatgtagtattcatccgatatccggacctacggacatgtggttcgatcagcgaatatgaacctttagctcatcacatttctctattacttcttgtctaacctctgctttgtacagtctaacgtctatacatattccaaacaaattccccttcctactgtgaaccccgcatctgaacaaaatggctacgctaaacgagcaacttgcgacattgactgagaactactcgccctgcgatgtatgccagcgtttctttccataaaccgtcagacgatgcatctaacatcctaatttcccaggtatcagacgccctcatcaagctgcaaaagacacccgagggcagcacagcacgagcaggctacctcgcagatctaggtaagccatcggcaaagcctctaactatatctccaataaccccacttacatctatcaaccagtgccattctcgcccacgacagggcggaatgaaacaatgcccaagattgcggctccggccacaacattcaaatttctggccaaagacgccagcccgccagcaatcgcaactgaaaatccccagaagcacggcttcccgccgggtaagcactgggtagatcacgtcggcgcatttcaagattcggatccctccggtgccggatctatcgttgtcatcgagcagcctgagggccagtactgcgctgtgacgggcgggatcatggcgacccggatgaaagccctcgggatcaaagccacggttgtgggtggccgtatcagagatttgagggaattgaaagccactggacttccggtttgtcgttgatctcccataggtttattggtagcgttactgattgattttcgcatggtggtagatctgggctcatgctacttctactgttggcaccaatgccgaggccaaggctggtgctcgtgatgtgcccatctcaattgggggtgttactgtttctcctgtgagttctagttcctgtgtgctattcgattgcttgatgatagagtgcagaatctaatcattagaatgcatttagggagatatcatcttctgtgaccccttggaaggagttgtggctattcctcgcgagctgctcgggcatgtgctcgagctcatgcctaaactcactaccatggatgagaaggccattgaggccgttgcgcagggaatgagcgtcactgatgcttttaagcaattccgctgatagcctactttcagccaaatgtatatacatataacgttaggctacggcagtctctatgtatatttttggtagtcgctttgtagctttttcaaatatctcttcacgtatcttttcggatgtatataaaggcaaaagcataaaccgtatagaggactttccgagtataacctctgaattgacgtgagattgatttattcaggtgcaagccatactgcaggcaagatctgatatggcttactgacggctaaagactgccgtaggtattgaaccagtaaggaatctacagcgatattattaccaaatgtatagcatatatgctggtccaatcttttggtattcgaagtatacaatacataacgagaaatctgtgtatccaaaaaagaaaaaaagggctaaaagccaaatcgctgtgcaaatatacaaccgaaactcaagttttgcttactccgacacccagacggcggccatacccataccggtaccgatgcacatgctggtgacaccgatcttccggtttgtgcgcttgagctcagtaagcaatgtgctgacctggcgagcaccagtgcagccaagaggatggccgaaagcaatagcaccacccttggggttaatcttctcagaaggaatgccgagctcattaatacaccagacacactgggaagcgaaggcctcgttgatctcgtaaatgtcgacatcatccttggtgatgccggccttctccagtgcaatggggatagccgcccaggggccgattcccatgagcaggggcttgacgccgacgacgctggcagcgacgtacttgccgatgatcttctggcccagacgctcggcggtggaccgcttcataaggaggacggcggcagcaccgtcggagatctgggaggcattaccagcgtggatggagccgtccttggaaaaggcgggcttgatcttgcccaatgactcggcggtgataccctcgcggacgccgtcgtcggccttcacggtaatggtcttctcctcgccagtcttggggtcggtccacttcacgtccaggggcgcgatctcctcgttgaagagaccagccttctgggcggcaagggccttttggtatgagtgggcggcgaaagcgtcttgggaagcgcgggtgacgccacggtccttggccatgttctcggacaggacacccatggggactttgcagtttgcggcctcggggtggctctcgaggaggtcggagaactcggtcacggcacccggtctgtgtcaacttgttagccatagtatcgaatgatggaatgccagggcttgaagcatacccgtactgagaggacatgctctcaacaccggcaccaatgccgacatcgatcataccagcctgaatggcgttggcaatatcagcgatagcctggagaccgctagagcattgacggttcaagctcttcacggcggtgctcgcggggaagccggccacgagagcggcagcacggaactcagtagcaccaccaccgggggcgaggacggagcccacagcaatgtcctgaacgacgctaggatcaacgccgctcttgttcagaagagccttgaagacaccggcaagcagatcagcaccagcggtatccttgaagccacccttaccacccttggtgaaggcggtgcggagggcacatgtcacgacaatatcatcggggtgcttctcgatgatagcggcggctcccttcttgccgccagggccgaagtgggaggaaacctgattcagacgttgctgggctatagatagaagttagcttgctgattttatttcgattataacttggaacaagccactaggcacaaagtattctgttgaatacatgcccatggctgttacgtccacagcacttaccgttagacatgacttcagtctgttatggaggtatgggagaggtatgaggattaaaaatagggcgaaagcgagaataataaatccaaatatccggggaagccttgatttataaatcaggcccgtggagtcggtggtatttcccctttggacgactgccgttactggccgttgtcgcattctgggaaagtgccgaggtccatttggccgcatcattgttgatccgtggcagtcacgggatctccgactggtggatcgtggggcatgtgaaatcagatatcacatgcgaaggttttgcgacgtcatggtaagtagatcggcccgacataagatggtgcataatatcgatatttttcaggtgttgtttgcacaaaaattatttctctactggtatctcactttgaataccgagtataacgacatgtatccacaattaactcggaatggcataggttaatgatttttaacatttttgtcctcatatatcaagaaaggaaagtttattctaatcacatcccctgatagctcagctggaagagcgcaagactgtaattgtcctgttctgcaaagaacctgtcatcttgaggtccctggttcgatcccgggtcaggggatttttttgtatttttgtgctacgtacaaactttgcctctctggtgtgattcctccctaacactactccgatccaacacaatgaccgcaaattcctatacggtcgcggatatcaatctgttgtctgaattcctcagcgacaatcaagtacaaaatctctccaccatatcccctgtcgactgcattgtcatatgcgcctcagccgttctccacagtgccgaggttcttttcaaggttcttcagcaaagaccatctcttaccaaagctctcgtactgtgcgggggcatcgggcactcgaccaagctcctttacgatgcagtgaaatctcatcccgccttttcgcggattgccgatgagatccaaggtctccctgaggccaaagtcctcgaacgaattctagacgagttcttcgatcgatctctcattaccaaggaaggatgtcagattctccttgaacccctatcaacaaattgtggacagaatgcttcattttctcgcaaagtcctcgatgaagcgggctttcgggcaccagccacttgcattatcattcaagaccccacgatgatgctcaggaccagggcatcgtttgagaagacttatgaaggtgcccaacctccagtctcagttattagttgtccggtatttgtgccgcaggtgcaattgtctcgtggcggagtcattgagtattcagacatgtcgccgccgtcagagttgtggtcgcaaagtcgttttttggagctgatcatgggcgagatacccaggttgagggatgataaagatggttatggtcctcggggacgtggtttcattgctcatgtggatgttccaagccatattgaagcagcttgggctcgactacaagtggtggctaaaagctctagatagggatgtagagatatatattgcgaataacacagacggacatgtgttgtaccttaaaactacaaaaatagtcggccgcgtttgtggcctctgtcattgagaacgacatgatttagctagctcgatggtaggaacttataacctttgacatgtgtactgcgatagaataagaaccgaggcatcattatggagatcccgtgcatacatatacctgcaatgcaagtacggcccacaaccccactacaatatatgtactgtacaccgtggaagtcttgagtctagagtgaacttcttgactgtttcaaaggattaaaaaagaaaacactcagaaatattggaaagatataaaaaataatcccctgacccgggatcgaaccagggacctcaagataacaagttcctttcacagaacgggcaattacagtcttgcgctcttccagctgagctatcaggggatgtgattggttgattagcatatttgagcattatgaaccaaagccatccgacctggcttatacccgagttgtccactttaacttaattacaaccttggaagactcaattacttgtcgaaaataaagctatacccactcactggtcaaggtcggtgtatctagataagctggcggcaaaataccctccaaatcagctttgagttgaagcgccaatgtcctcgagtgccaccggtgttgctgtgtatagccacccatcacccaaaagccatgaaggcgtgactgcctcttccataagccacgtatctcgccctcggaatcaacaccccatgtggcgtcgatgcgagcagcaatctggcgaggcccaagcttctgcttactatcggcctcgccgtccacgctattcttgtcatcctcggcaccgttgggagcctgacctggagagcctcctaggatctcagcggcagtttcgcgcacgtttttatcaacaaatcccgtacaccagatgacagcatccgcctcaacatggctgccatccgagaaccgcagcccagtcgccgtgtatgcaacaggctcaacattagctttgataccagccttgccttcttccaacagcttggtaccgcccacatcgacatagtgtccaccagcacgctcgattaaattttgcatcaaagcacattctgggttattgctgtctaggacggggaatccagctgctgccagagctttgtagcgatctggctcctgtgatgcgaaatgcgaaaacaagttgcgggcgaattgggcatctatgactgtcgggattgtcataaaacagttatccgcgagctcaacgctggcatcataggcgcctaggctggctgggttgttgacgtagtccactgggactatgtatgttggcgaacgcacgttcattgtcacttggagtcctgcagcgtggcaatcttcgagaatgtcgaaggctgtattggcggagccaatgattatgactgactggagtggaagtaatacggtcaatctcggttcttttcgcatcggagcttcacccaccttcgcccctttctccttcacttgctcggcattcttgtattgctccgaatgaatgctggtacctttgtacaggtaggaatctgctatcgatggtatattcactttttgggatgcaatacctgtggccaagataacgtgtttagatattgctttacgttgaccagcaggagtctggaacttgactatccaccgcttagtcgatggatcatactctgtccattggatctgtgccgaggtgattatgttgagattgaaagccttgacatattgtcgtacctgggaagccagatcctctttcgaaagacgatggggggtaaggagcttctggtcatagtctggtttccagatttctatcagtcgctcactcggatatcaaggcatgagcaacttacccatatagggcaagtgacagagtgaagtgaggacatggaaacgcatgctatcatagcggagagcccagttgtcccctgcgtggacattgcgctcggccatgacactctcgactcccaatgctttaaggcgcgccgcaagggcgatagctctttatcatccagtggcaggttagcatggatattgttcgaggctttttcgtcttcttacgaatttccacctccaattatgaagacttcagtctcaaagctctcaatcccaccaaattgtcttccgggagaatgaagcaaggtctcattctctttctgtatatccagatctttgagaatggtgctgagaacccagatcttccactcgattatctcgttggcgcccttgaccggcaggagtatcacctttcctttgcaagtggcggccggtgagctggtttgaaaggcaattccgcagtcaatgaattgctgtgcaaaaaaagtcagctaccattcacccagctctatctccacaggtcatgctcacaagaactggcgtcgcttggataaatatggccccgccatcgaccgttatatctcccttgatggccctcagcttgttagtctccagaagactggcagcaattatgccaggtgatttgaatgtccgcaggtggtatgtcagtgctagctgatccctccaatatgcctggtccttccagaagcagtcttccagcgcccccgcatcattcctagccagcgcggtgttcagattatccaatacaagttgagtttgcttggttggttcataatccgccattgaaaccggatctaccattccaggggcgagcagaggaagcgggttttgagccatcaacttgaggaggtcgatgcgcgggggaaactcgtcgcgcgacagggacatattgtctgtggatcgcacattagtcgtcaatacaatgcctacgcaccaatcttctaatgagaactcactggcagccattgttggattgaaataaatgatgtttgccttgggtgcggtatgaagattggacggccctccctgatcagtcgacctggcgataggggaaatgtcccgcatattggccgattcgtctatcccgtcttctgcagtccttagtcgcccgtatacgggttagtgcagcgatggcccgtgtttcccggtggaacacgaggccttggggcatggcagagtatgtctcccccgcaactttgaaaccaatttcatgccttgaatattacctttcaccccgtcgaggtgcccaatttccttcaaagaatgggccatggtacttcgtcggttgttaatgggcattgacctacataataagcagtcttcatacgagttgaaacctcaaatatggggccgtgcttggtgggggagccactaaccttttcgtccaagcttcaattgatcggcggtggtatgtccgctgtcatctgtgggagatcatcatttgtttgaaggcgcatgattgtctgtgaattgttcatgattgttccctcgggtcttgttggcttccgatctatttgaattggtatggtgcgcgccacctttttgttgtctttggggattctgccatccaaatgtgggttgtatagatatcacttggctacgaaaaggcatcgccctgcttgctacgagactataaacttcctaatactaaagcgtccgatatatttgccctaggatctacgctctacaagctagttgctggtaaggacctatatagcgaactctctggggctaaatccgatgacccggatattatcaaagctcaaatccgaagaaaatgtatggtagatcatgagattgaaacacggaccatattcctgatgtctcttattcggaggagaaatcacattaggttgttggagaggcgaaattcccactgcccaggcggcacttgattttgtacttgaaagatttcgtttaattcatacatgaatatagaggcaaaggagcgcaaaagtccattacaaccattccattccaaatgctccattcaatcaaacctaccaagctcatgcccgtgcagcccgtgcagcccgtgcagcccgtgaagcccgtgaagcccgtgaagcccgtgaagccctgaagccatgaagccatgaagccatgaacccccatagagatccacgtacatattcatagcttagagttataatttgtattcgtccatatacgacaagcaacgactcggcgaatattatatttaccgaaatgcaaggaccaagcagaatgaatggccataagggcggagtaagtatgagaagatgcacttgtaataggtgaatagaatagaaagcgtagaaggtttagaattgattcccaacgataaaagacattgggatgttagaatatgagttccaccatgctggtccttggagcctatatagtatgcttgctataccatggtttgttcatacggactagctagcccgatagcgcagccgtggccaacggtttcgcagcaatagtacggagtagagcagtaactatttaccggtgaagtcaaatacatcgtatcagcagtgagaggatacatatctaacagttttatatatattagccaacagaccgaggcgggacgtgggttgtgacattgaagagttggccacggactatagtcgcagatatgagaagtcagttctatacaatcagacagctggttatccgaaaaaaaaaaggaacgttggagagaaacctcgcagaaatcagatagcgcatacatactccatacgatctatacaaatggagtttgggaaaataaaaaaatcccctgacccgggatcgaaccagggacctcaagatgacaggttctttgcagaacaggacaattacagtcttgcgctcttccagctgagctatcaggggagtacatgatataagtggcaggattgtatattataacccaaaactacctaccagacatcgctcagtgattcacgatccatattcccaagaatcaccagccaatatacctccaaccgagccgaaagccaaacagacaaccaaaccaagcagataaatacccatgatccgacgcgccctaaccgccgcctcatcagcgcgcgcatcacccccaagcacattgacaagcgcctcagcctgcaagctccaactcacccggccatcatggcaccttgtacgcgacccgacccctcgccaagcaggagcatataattagaatgcctctcgagcatatctccaagcccaaacctcaagcaaaaaactaacagggaacccgcgccaacagagccccagcaccacccgcctcttcaccaccaccccgttcacagccttcacagcatcaccaccaaccaaagacccctcacccttccgcctcgccgcaaataaacccgactcctccccgccctcgttcgaagatgtctattacagccagtaccagccaaagcgccaatggcctccggatatgtccaagctgtctccgaaacaccagttccggcttgagcgcaagtaccggcggcgcgcggcgctcaagtatgcccggccgaagtttatgaaggctgttttgttgggacagtgggttgttattggatgtgagttttctcttgagatggggttagggttggaaatttgtggattgcgaattgcttatacacttgcggtggataatggggttggatttcgaggaaagatgctgactttttatgatacgtagttgtcattatctatgcggtgctatttatggagtgggagtcggatgatactgcattccatgcggtaagatatctctctggaaattatgctcatttgtgtcttgactaacattatttctagattcggaaaagcttctttgctggtctacagactgtattctccagtgcaccacctcctggcccgagaaaggatcagaaggataatacagcgtctgaggagagctcgtagtcgagtcatatttatgtctgacatcaatatattctgtaaaatattcaactagattccctacttgcacctgcagtctgccagaaaactccaaaattcaataagaaaactactgtcgattcatttaatcctcatatctgttcatcatttgtcgtgaagaaatcctgtcggaagaacaggcgtcgctgtaccatggagagaaggagaaagagacaggaaacatcaacagtctgtctctttctcgctttttgctccttcgcctgtgccaaatatggcttcattacatcatgtccgcaggacttctctggacaaggaaatgcagtcaacatgccaataacaccaagaatgccaaggcctgtcagaaatgacagacgaccagtaaactccaaaggtcaagtaaacaaaaaaacaccaacaaaataagttggggtggggctgcttgaggaccagccctaacgccgagtcatgatcgtatgaaacccaaagaaaaggatagaaaataaagacaagagaggaatgggaaattcgttaaatggaaccggggaattgcgcacccggttcttaaagccagctgcgcaggtcactcgacggggtaagcgggccagcagctgggcggttgtccgcgaagtctagagcaagctccagcctgggcggccgctcatcgaccaggccttttctaggactaccaggcgcaaccttcttgggtgatttggtgggtgagccaggttcgccacctcggggcgggccttcgcgtacaaaggtatatggccagccatcatcggctgcagctgcgacccaggttcgcaggcaatcatgcacagaagaatagaacttctccttgcaagtacgcagactaccacccatgactttctcaaaaccagaggcacgaagctcatcacgaagttggtttcgctcgtcagtggtaggcagcatggcaacgaggccgtttacaagatcgagatgtgctgcaagatagttggtcgcatcccattcaacacctccaacgtatggggcagctggaacaggaggacgagggactgggaagtgacgctcgttataaggacgagtgtctactggtatcttttcgccgaaaaggtcttccgacttggggaggggaatcacatttaggtgatgaaggaaaatccagaagacctccttggtcacgttggtaatctccttacaccacactctatatggtcgcgactggtaaatattcgcaatgaaagtcagtggctggttgtccactggtggcgctgggtccctcagataagaaagaatctgcctagcgcgcttggctcccagttcaccaacaggagcagtggagagctgcgtaaacagcaggtttgcaatgataccccgagtggtgaactcactgggacccttcttttcctcgtcaaagagcatatgcagcagagcggggaaaagttcatcctcgatggcagtgaggtgtgctagggccgcagatgtagtgcaaagagccttcagacagagcaatgcctggtgcagaagggtgtcttcgtgatcctcactgtagacgggttagccactggttaaaaagagggagacagggtacataccgccaggtcatcttcataatgcggtagagaagctgcacaatctcatccattcccccttcagtgataaagtcattgacccattggacggtttcgttacgtaggagaagacgcagtttgtgcatctttcccacctcaaccatctcgggcttttggatctctctcaggtaatgcacaaagtcggaaggatccgctgcggtatcgacagcggccgcatcagcaagtgatgctgttgaggcattggcggacagggtggtgtagacaccaacaggctgagaaagatccacagaccttggccgcatccggcttgatgctccactatcccttcgcaactttttgccaggcgacgaggggcctttaaaggagaagccgcggctcctagatcgtgatcgagagcctttacgatcctgagattgggagtcttccttggattctttgccgcgtcctcgacggctatcgttgcccgcgctgggaggagtgatattctctgtccgatctttctggataaaatcagccttgatattagtatcaagtgagcgcattttatctctcatgttatgagggatgttccttgcatcctaacggtaggttagccttgatattcaaatcggttgtatatagtccggccaacaaaccagcagcttctcgaactcgctttcgaggtccttggagttcagatgctgatgcacttcagcatctcgcccctttgcattgaatgcagagatagcagcctgtacacgggaaatacgcttgggctcttcttttggcatggtagacggggatatctttcgtggactcggtggccccctgctcttaaaagaggcactaccgccttgcccaatggggtcgctttctcccgaaggtgcgcgctgcaacccaagaatatccttcacctttcggtttcctgtaagaatctctgacttcggacgaggcttatggtcagtcggtttggcgagggagggttgggagtagtcgcagaagttgcgttgctggcttggcccgtaacccttgggcatatagagagagacctcgtcctctacggttcgcctcaggtcggcagtagagttcggcctcgatcggccaatagcctctttgcgaaccgaggccgagtcctgtgaccagactggggatggcatgttatcaatcaggtcggtcgggctgcggttttccttgtcgcgactctgtttcgagccatccttccttccccgctgggacctcttgaggatggccgagagactattagatgatttggcctttttgggcgacaggtcattctgctcaagtggctcctccgatttaccatccctccgctccatataatttctgagagacttcaacgagacagcgctcttggtcttcttatgaagggcacctttgctttccttgccgcccatctttggcgcggccactccgtggtcgcccgcatcacgattggggacaatctcactgagtgggtggtagccagcaatgaaaccaggctcctcggtaaactggaaagggatgctctcgattggcttgcatctcggcataggtcgcgcggcggcggcatcgtcggctgattgattccgtttatgggttttagacgacatcatggcccggaacatggactgtttggtaggggatcggttcgcatcgtcaaagatcttggggccagatgtactcgcagccatcgctatcctctttgaccagcaactaggtacatcttgttagcagatgaagtgcatgaacacctgtggaggggaacgggtagttgcagttcgaactcacgggatctgtgcaaacaaacgcagaatagaacaacaacgcggtcaaaaaagggaggtggtcaagtaaacccttcaatctcaacaaagaacaaaaatgcggggaaggggataggccgggtggaagaaaaatagaagactcagatgggcaagctgcggaatttgaagaatcaacggcgccttgctgccaacagcaaccgtcatcgagtatcaagatgttgatccacttcgcctcgacttagcgcatgagacgatccttggggttggctggatggaaggtggaggagtaaacaacgtgcgggtaaagaggttgcgaggggcaacgccgggacttggcggtgaacttggagtttattagcaacagtgcgccatatcgggtctgtctgcgctgctttctgggggctagacatgtcatattgcttattattgccattcatttggggttatttctcagcttgcatgtagtccttgcatctttttgtttatttgactgtgaatgtgaatgttgttgttgttattgttgttattactgtacgcatccggctagttgtatatattggatagatccttgattgacacttgatacatctactttgtaatgtaaattatatgaaataccaatagcatctactaatctacaatcgtatcttacagggtatagtttgctactatcatgcctctttgttattgacctatgccgatgccggcaagactggccccattgagaataaacccactatcgtattacatgcagttatgtcgaacgacgctcaaaccactttttcagatcttctgatcatattttatgcagttagtgcgttgagtggaattcgatccacaaccgtttgcgacttccggtggcgggtacttaaggcgatcctttcacttcaaacgcagacataaaagacgggagaagaatgtaaaactgcgatctaagcggtgctttgaaggatacaaagcgatatatgagagacaagtctggtttatgtacaacttagggtttgccggtgccagaacggcgaatgacgaacatcgggcattttcggactggcagtattccaccaagttacttgtcgcatatttacattttggtctacaccccagaattcaaggcttaattcaagataaaatcatcttccagagcagctaaacaccagatcgagccaaagccaagcctgcagcatgaattgcccctcgcggactgacgacactctcgagaacccaagctggaatcaaagcccaccgcccttcagcccagacaccactacacggaatgactttaatggtctcgccaattccagagtacatcgcagacatgccagttcggccaatgcagctggagatgatccactatgcatcgatgacagacccatcagtcagcaggatcaagaccccggaaaggaaaaggtgccaagcggcgaagtgaccgctgcggactcgggaggtgattcacccccggggagcagcgggtcacctcgccactctttctatactagcttgaagtcttctcctctgcactgcgctcaaacgctcgttaaattcggccgttttatcggacctggttttcttatcgcggtcgcctatatcgaccccggaaattatgccaccgatgttgcagccggtgcagacttcaagtacgccttgttgtttattgttctcctgtccaacctatttgcgattttgctgcagtccctgtgtatcaagctgggctctgtgactggtttgaacctggctgaaaattgccgagagcaccttccgaaatggcttgtgatttttctctacatcctcgcggaagcggccattattgcgactgatattgcagaggtaagtgtcccgttttggatagaggtcctaattgacgtactgacaaacttggaaggtggttggatcagcaatcgcgttgaacttactattgaaaatccccttggtggctggctgtgctatcacactagtggatgttcttttcattctcattttctacagacccaatgggaagatggtgggacttcgactgttcgaattctttgtcatggctttggtattaggtgttgttgtctgcttttgcattcagctctctctcgtaaagaaccagtcagttggtgaagtgttccgcggatatgtcccatcttcagctattgttcagtcagaagggtaagtttgttcagctgcctctgtacagtattcagctactaacgcatcttcagtttgtaccaaagctgtggaattctcggtgctaccgttatgccacactccctatttcttggcagcggcgtggttcaatcccgtcttaaggaattcgacgtcaattctggttacgtggagacctctatgcctctagggagcgccgatggcgaagtcaaatatcgcccgtcgatccatgcaatccgcggctgcatgaaatactcgatcattgagttagcgctgtcactgttcaccttcgccctgtttgtgaacagcgcaatcttgattgtcgcgggtgctgctctctacgatctccctggcggaggcagtgccgacctgttcggaattcatgacctgctctctaagtcgatcgcaccagctgccggtttagtatttgctctcgccctgctactctcgggtatctccgctggaatcgtgtgcacaattgctggtcaaatggttagtgaggggatgctgaactggaccatccgaccatggcttcgaagactcatcacccgctcggtcagtatcattcctagcatcatcattgctggagctgttggcaaggagggccttgacaggactctgactgccagtcaggttgctttgagcgtgatcctaccgtttgtctcggcgccactaatctggttcacttgtctcaatcgctatatgaccgttcggaccgaagaagcttccgaacgagacggagaagtcgatgtagtgacagttccgatgcggaacaacctattcacttcggtcgttgcggttcttgtttggattgtcatcgttgtgatgaatgtggccctgctggtgctggtgggactgggcaaatcatcttaatctctagatgctgatcctttccagacacgagcacgccccggattgtagcgaaaatagatccatagagcttgataataccccctctaattgctatattatgacacatggatggcatgagatcttcaaatatgatatgaggtagcttattgcaacttaaaataaacacccaatcaactccgttggctgcgccttgacacagaagaacacccagttgccgctaaacaaaagcacgctttaacattagtcttatccaagtccgccagcggcctccttgaccttatgctgctccggcggctcatcaataaactgcggtggagccacctcatcctgtaggaagctcggcatagcactctcgcccatgctgctctcaaacatagattcctcgcccagcgcctcaagctccgcatccaactcggcctcatcaacatcctcaggaatatcataggcccgggagatactctcttgaatctcattcccgacctccatcagatccgccatctcatcctgcatctgctcgatcttatccacgtcgaccttgccatactgcttcttgagctccttagtggtcgttttcatcgcatccaccgtcgtcatcacattcttcaaattatcctgcatcatgcccgcctgctccatgttccatgattgttgggagagttggtctcgctgcgcctcgtattgtttccggcgctgcaggaccttgagcgctttctgccggagggcggttttgccgggcccgtcgcgcatcttggcgattttagcctggtatgtggagagttcggcgttgagcgctgcgagcttgacatctatgctggatactcgagtgtcgacctgttgtatggttagtggggtaccttgaggggcggggatgggtgcctttgatcgggcttgtgcgggcatcgtacattgctaatagcaccttgaagagtcggcttggggcctgtggtctttgtgccgaatagtcgattcatgatggtaggttgggttggggtggtttattattgaaaggtggaggtgagggcaaataggcagcggacttgacagcgattccagaccgcgcgaggccagtgcttaataaaaccgcgatcggtgggccgagattgtaattaccaatagctggggcggagcacttctgataaaagctggcaaaatatagaatactggagaatcttgaattgtttgatatacaagtgcatgcgtatgacggatttccttgcacttcttggctttctcttttcgctttagtgctcacctcttgccgcttttaaatcaccgagtaaaactgagcactccctagttaccttgacttgatcacgggccattatataatcagcgtgatctgcccgctcactgaacatcatctaactgagcatcctgatttacccactagttaagtgctctctaagtatagggaggagcggcctaagtaagctatatcaataaaatgcgatgcgctaatcccatcacgtgcaaccatttctatttagatcgcctatcaaaaaaggactggcgtagtcaacgtgaccgttcattctagcggcctcaatcctatccaagtgaaaaatttgcagtagggctattcaatcgacctatcgttttcccatttcagtctatgcttctggagtctctcggaatacttcgcttaccagaccggcgatcccctattcgggctttgcactactaccagggcgagggtgattggatggatttccttgaaggttagaggtccaccctatatcaaagcaactagagtaattagttttaagaaggtgacgacgatgaattacttctctcgttaatgagcgcataagttgaaagcttttctgaacgtataacgtcatgtctttcgcgccatttctaagtaggtcgtaaaccgaagacaaaccatctattactaaagttctaagggcccatggctatttcattttaatcctaggaattctaagaaccacccgttttccctagcatttctaccttagatgatgccattttaaaagaggtacatatgtctagtcacttgctccgaaaacaatggtcttctcattcctccacatccaagttaattttagctagggccatgcgtgccgaggtttctgcgctaggcaggggttcaattccaaattaattagcataatcaacagtataacccccatttctcttatccacagcccttaaaggtcggaaggtgtgatgaatgaagtcaatatatcagtggtagatctaggagatcatgccgcatggactgtgcgctatgcatgcatgcatgcataggacttcagaagctcacgttccgtgacgataggggcgggctgcggccggttctgatcgctttgtttttttggtgcaatgaggtactagtccgtggttagacagaagcggtttgaaaaaaagaaaaaatataacaattaaaccaggaatttttgacggagacatgcacgaagtacaaatatacgtcaactcaaatcttgcaggagccctttagtctcctagtaccattataatctctccttatgtggtggataatctatgaacagcgcccatgtgactgaaggctacttggtcggatgaaaaaagtgctattcaatgttgcgtgccagattccttttaacaaaagaagtgcatttctaatcgaatatcaagtatggaaaaggaaaagaaaagaaacaaacgtgaaaataacaaatgggcttttatacccctttagggacaaagccctattctcgtttcccctagaaggaaggtacgactgcctgcgcaaacgaccaacagtataatcctaaacgggaaagtacgagtcctataagtgctaattgtaatataacccctaggtaagaatacatttagtccctaaatactggcttctcgtcatccacgtggtcgtccaatatccaatcgtcttgcgcggcctcgatccattcttataggcgcatcggtggcccgggcttcgctggataggcatcatggaattccttgatcatctccggagcattcttaaagttacctactgggtaccatacgggatctaggtcgtatcctaaccactgtacgcggtactgcagcttcctataatgctttcttacatctaggatcttttcaacttcccacttatcagtctgccctacctatatcggaggtagcggatccgtgtgttatcctgtaagtggttctatactcgctgccttccgcagcttacttaggttaaacactaggtagacgttaattgactgtggcaggtctaacttatatgcgttcccaaccttttcgatgatcttatagggtccactagtggtataagagagttttcgactcggacagtcctatagccaatccttcgtagtaataaaaaccaggtcgccaataccgaagtcctcttcgcgacgataacggttagcctattgtacctatagttcctatgactttacaatctattcacatatatcttcccagatctgttataactttaagagtcgatccgccgcttcttattcgttatacatcagtcctatacggtcccaattaaaagacattgctagtttataaccccgttcaacaaagaaaggggacctctttgttatatcttacagaagaattgatactacgaaatctactattagtaggtattctaaccagttgtcctagttgtattcaatatacagtctcaatcgctacactataaactgatttacaatttcgctctagccgtctgtctataggtagtatataatagacagtttccgcttaatccctaggattctatagaactctgtctaaaactcagagataaactatccccctcggtccgatacaatggtttcagggatccctataatccgtataacgttatctataaatagacgcgctatctgctttacattagtatctttataataggggattgatatcggtctcttacttagtcgattaataataacaaatactatattatagccgtatctgtcctttaggaaggaacagaaatccatcgataaatgctactatagtcgtttaggaatcggtaataggtataggagactaggcgtgcgatctctctaggtctttatacgtttatatactagacagttgtctatataccgctttatatctgtaacctatcctagctaatggtatcttattgtaataagcttcttaagtttctcgattctagggtatatagttaacggttatcggtatatcttatcgagtaactatgcttaaagatccccttcgtcggggacttcgagatagtcttcaaatagcagtaatctgtcttacactacctaacggggatctgtttcctatcttacagtctaacggaatacttctagcttaaggctttagcggttcgctaactagactcattcggttatatctaagttctatatagtcttaactagtagagggggggcctctgtatcccatatagattctatctataatagggatatctcgatttctaatatcgattttatttcttctccgaaatattccttagggagtaacgtaaggtaccgactgacatctatataagggctttccttctttaaaagaacgtctacaataatattccatttcctaggacagtatttaatcacaaagtagaactataagaggaacttactctaccgtacttattattaattcatctatcgtactattataaaatatttgagagactaataatctataaggatctcgaaacgttctatacaagagagcccttcaagttctagtcgccattcttagagtatacgaatgatcgtaaggagttccttatccctgattttataattaagctctacaggttatatagtctttaagaagaaggcaataggataccaaaaatcatcggcttcgtgatattataagaggatagcaccaatgactccatttaaggcatccgtttctatataggtctagaggtcgggattgtaataccataggataggtacagttatcaacttatactttaattatataaatacttacttacagtccagcgaccattcgtacactatatcatactatataagacgatataacggtttcgaaaggaaactataatccttaataaatcatcgatagaagttacagaatcctaagaaggactatattcccttaatcgttaacagtgtcttccagttcctaataactgcgatcttctctagatctactacaataccgtcggtactcacaataaatcctaagaacttagttttctatacagagaattcacacttagatagtgtaacctataatcctactctttatagttattcgaggacttctctaacatacttcttatattcttcgagtatcttgctatagatcataatattatccacaaatacaactatatagtcgtctatacagtctccgagtactatattcataaatcgctggaatattataagaccgtttataaggctaaacggagtcactttatacttaaacgatctatattaggtacagaatatcataagatcttctatagctagcgttaacctaatatagtggaaaccttggcagatatcaagctttataaagaattttgctttactcgttcgttagagtactttatcgataagaggtaataggtaacaatctttccttataattatattcaatcttcggaagtctatatagaaacgtagaccactacctagcttcttcactattaagattagtaaagcatacagagccgaactaggaataataaatcctttctcaagattatcgagaatatactattttacagcttttagtttatctaacaataatttatagagtaggcagtatcctagctatacttctacttcgaggataatattatagtctacccctaggcgatacagtagtagtttattggattttttcttagagaatacttctataaaattgtagtactcccgcgggagggtccttttaatcttatcgagttctatatccttctcaattgtagatttaatatcaataatctaatcaatttcacagagtaaggtctaaaagacttcgacatctttattaataaccatttgtattcgtaaacggttaaatcctacctaaccgataatactaatatctattagtagaagaacttcctttatttcttcctctagtatctccgttcaaagaggtactagttcgatttcgtcgttaaggttccattctatcttacactactctataacttgccagtacctatattaatactctcttataacagggtatagcttctaagtctttaggtcctaccgcagattacttaaggcttatttttcgaagaggcgatcgcatcgttctatatccttctagtgatccggcttaatttatacagaccacttaaggatcattataggtacgggtacagttaactagcctactaccttatcaaaaagggtattcttatctagccagattatacgataccgtcggcagttaaggaggatatcgttctccgcgaaccacatatatccgataatcatattatatcggcctagatctactactagtataggaatctactactagattcgatcgtctatacttagcgtaagaacgacagtgtatataataggtcgtaataatttactatcgaatcccctaactaggcactcgcggtctagtttataggtatataacccaaatttcttactaagtagtataaccagttctatattaataaatattaaactatctactctagtatctactagcgctaagattataaaggaatatctattataagtcagtcttatattaaatactaagctatctcgtagacctcctaaaagcttatatagatctagtgtatacagtgacacctattttctacttaggattaagacttctcctaggctcctacttttcctaggtctacgttatcctccaattcttcgagttcggttacacgcgattagttgtaggtctagttagtcgcagtaacagcgcttacagctatatttatcttcttcttcgggcactcgaatattatataccccttttccttacaataaaagcatcgaccctcctttataagagtctctcactctatggctaatagtccagataataaggcagtcccttcacgttttatatacagggtaaaactagactagttagcagtagtcccaactccgcttctaaacacagttattatataggtacatacggtaccctttacttcctattagagactaatcttataggacatactttagtaactctaggtaaaggtatcgaaaggaaccgtttcctaattaatagcctatataacttaactctgcaatagatatagaagtttcgaatataggttacacttacggttttctttaataaccgcggcttcttccgtaagctacataaatttagctaagaagtcagtaaagtcttccttaggttttatcttaagtttataataggccgtatacacttctgtacaacgatttaggttcgcaaagacagtacagaggtagacaataatatcttctgtatcggcgtatagattatttaaggtcacacttattcttaaggcaatatacagctatactttgcctttatatcggctttacacatatagtttccggtagactagtaacaggtaatagtcggcatttgctttaagcttctatctaataactatctcctatatttcgaaacggacttcctttctatcctttaacattagtatatcgggtatcttcatagacttctaactaatgactcctataatcggtatatcacttcgggcttagttcgtttcgctctaagtaagaacaaggcgataggcaaggtcgtcacacttacgtatagcgatatctctataggcggcagccttatcacgttcttcggtagcttggttacattctatcataagacaatctttctctatatagagtcgatcacattcttctataatttatctaacagcttcctcagacctcccgttctctaagatcaagacctagatttcgttatatatcatctggttatcatcttcgactatttggaaccgattagccagctcaaggaattgttccttactaggagtcgtgtatataatcttatagatagaaggagtcgaaggaccctcctcagggctatcgcattcaatattctcaattagatcctatatttcagtaggagtcggggttttagggttagcagcttcttttgtgagacaatccggtactacgggttgttttcccttaccgattgcggcgatccgttgtggtaggactatgactggtcctgttctggttggttttaggatgggtggggtgaaaccagactaggacaaatcgtaatgattatctgtgcagtcgtacggcttcagaagtttgggtttgggatgatacttgatattatattgcgtgccagattccttttaacaaaagaagtgcatttctaatcgaatatcaagtatggaaaaggaaaagaaaagaaacaaacgtgaaaataacaaatgggcttttatacccctttagggacaaagccctattctcgtttcccctagaaggaaggtacgactgcctgcgcaaacgaccaacagtataatcctaaacgggaaagtacgagtcctataagtgctaattgtaatataacccctaggtaagaatacatttagtccctaaatactagcttctcgttatccacatggttgtctaatatccgattatcttacgcggcctcaatctattcttataggcgtatcggcggcctaggcttcgctagataggtattatagaattccttaatcatctccggagcattcttaaagttacctactaggtactatacgggatctaggttatatcctaaccactatatacagtactgcagcttcctataatactttcttatatctaggatctttttaacttcctacttattagtctaccctacctatattagaggtagtagatctatatattatcttataagtagttctatacttactaccttttatagcttacttaattaattgtgacattcaatccagtctgaagcaagttcgtatgccgatgtcccggcttatgcaattgaaaaagatacgtctatgctataagaaacgttgcgattcgcccgggaaaggctcaatgtgctctaccatccgctgatcgagcccactctttttccctgaatataggagccaagactgcgtcaattgttctgtgtggggcagggccatacgaagaggggggagattcggaaaatcgcaggtccttcaattaaatgagcaattacaaatagccgagttcgtaggctgtagcattgggcagctatagcttcacgtagtagcattcttcaaccgagataactccacgtaagctgctcaacatcccaaattgttgcgtgcttgtgtcgctattggcttcaaaaggacagtttgctgatctgtcgggtggacacgaagatcttgatattaggatctgacgctgatctcaggtttagcctcggccctgtctcattaccggctcgggttggctcatacaagaggagaccattttggatcaagttattgagactgcttaagaaattccgatttagcaagacagcggtacaatagaattagaattcgaaatcgaaaacagattaagacactcacgctttctttcccagcgccccactccaatcgtactaaactgaattcgaccagggaaagtatgtatttctggtggatcgtcaaagaaaggtaatactagtaactaaggcgaaagtgggagctatgttaattctgataactagttgcacactaaagtattccacaagcgagtggccacccccaaatactatagtaaatgcgatatattctacatttatatctaaacagccgtatgtttatcctatctccccattttccgatagttataatatatcgtatttactatggtctttggggatggccactcgcttgtaaaataagttagctcgacccatcggcgcctaatcggaagctcaaaccagaagtactgtactcttttggaaactgtctaaagaaaatgccacagcaaaagaacaagcggtctacggagtacgaagtttcagctggccacgaacagtggggccactttgtagtagctcatggcgtcccgaacccgcacgcaacaacgcaacattatctggttaaagattctgattagtcgccggtcgagttatttcccggctagcctgatcaactgaataatggggtttcggttagtgtagtgagtctacgctgtagctggctcagcccgctacataaatatgagaccgaatctctcacatatgaactagatacagcttttcgcgctttccttttataaatcgatagtcaattctaccacaaggaaaatgaagatttgtttgattaattcgtcatacgaaggagttgactcccctttcgagaaggtatgtctaccctattgaggccttctcccagcatctctaacttcaaaacagtatgatgactttcccgaccctaatcggtatattccaaaagaccggcatgagtttttcactcgttacgtcaccaagagaaatgctgaggcggagattgacgagatttgcaaagaacattttgatatgttcatgaattacatggtgaatcccgacttttagatgccctctattcctggactatacttacagatctctttttcagtggggcatcgaaaccgacgatgtggcaggagttgaagccaccagatacctcgaaaccaagggtgttcccatcctcaccaacccatcgacatttctagcaaagaataaagtcgatctccagagggccgctgagaaaacaggtctccgtgttcccgaaaacaccccagggaaataccccaaaattgtcaagtactctgacggatatggttcgttgagtctggatgaggcatcaatctgctacacggagaaagaagtgacggatcgcgtggcccttttgcaggagaaagaaacaccctttggcatcatcgtccaggattatatcatcggccgggaatgttctgctatagttgtggaaatgggaaaggaggtggtggcattgacaccgctgcaatatgtctttccgaaagacactcccgacaacgaagccttcttgacgtggtataacaaattcgaagctgttgataaaggcaccatcaaatatgcatttgtggaagagcagcctcacatcaaaaacctccagaatgcggctgtggacgcattcaaagcaattggtgtcagcggtggtggtgggtgggcccgtgttgatatgcgtctggaggaaagaaccgggcttgtctacgtgattgaagtcaattgtatccccgtggtcttttacccaaagggaaacacacttggtgatgaccttgttgtgggagagagatttcctggtggccaggctgcattttttgacatgttactagcgaccaagcagatgcagcttgggtggcaccgtgttcaaaatgctcatgtcgccgaggtttacaacaaatttgccccctcgtaccattccgtgtggagcaattcggagctctctgagatgcaaaagtaccttactaccaattgggactattcgggtacagttcttgatgttgcatgtgggactggtggatttgggcagtttctccatgctcaagggatccaagccgaggtgactggcattgacctatcacccggcatgttggaaaacgtggaacattacagggaacttcgagttgggccaatggaggagcagatcatggtatgtgcctttggaatacttgttttgggaaaaatgaatgaagacaaagcttactttaatattagggtgctggtgaatatgaccatatcgtatgctttggtgccctccatttccttggtcctgtctacctcaatgctgtgctcgcacggatgtttatgcttgcacgcaaatcggtttcgatctcggtagacgacgtcagcgacgaatatatccaggcaatcaaagagaagcatggtgaattgacgtttaatgccaatcatgtcaaggccattgaagagttcggaattccaaaaggatggaaacgagtctatcacgagaggaggcttatgtattcttctccaaccaatggagagatggtttatggatatgggatgcgctttgagagagcagatgcctagtatttcgatggcttttcaaaacctgcgtgttgacataatcccaatttcacaaactttgacatcattgaaagcatctgccctatagtcaagaattatgccaatatcaaatcttatatctaaatcgagcctcgaaacaaggggttgctgtcaagtagcttggcagaatggtaagtataatttcgaccttgggagtcctggacattttgctgctgttgcttgcttccatttttcggccacttcacatggctaggattaatagctagagatagcctgcctttgctatttctacgtgtatgacggatttccttgcacttcttggctttccttttccgttttagtcctcaggccttgccgcttttgccctcaccgattaaaaccaagcacgacccttgattatataggctcactgatctccgagggctgcaattgagcacacatgtacttcgtacctgaaacatcgcctgatttgatataattttgaggtgcctcggctcggatcttccttcttgtcaagtttggccatctttctggttgggctcggtaatgatctgcagtgctcaatggcaacattgaaaaggatatagagacaacattgctcgaattgccattaataaacaatcgatggtccataggaccgaccactactgacattgcaaagcccctgaaaatgcattcatgattaccccgtaaatagtagaaaaataataaagggctgtgcgttggccgatcctgacagttcttgctccggtgccggcattgtcccctggcatatatatctagcttcattttccgctacgtgatgctttttgctgcggaattgacgaccaaggcctcgttcagatccagttcaggagcttgagcttgccactcctgctctgacgcctcggtaatcgttcttatgacctttgttttggtatttaaagaccacagatcagcttttcagactcaacccgtgagcatttgcctcagtgaaagctggagctgaaggatatgcttgagtgagggtggctcggagctgaaaagggcgccatgattttgccctgatgaacagatgacagttgggatctatgcttgcagttcagtatgagacacaagaaggagtggacatgggatcagcccgagtggatgcctaatgagcgggaagtagctatgtttctgagcctaggccgtactttgtacatcccatgattgctgtggagacttctacagatacagaggatacatctgattcgctatcctggttgatgataccaactgtagatttagggttactccgctcggtgggccgatgcttcatacttcatgtctggttcgtcatatacgcacatcgcttctacatttacatagcagctatataattatatgacagtggaattgttttatttgtcttcgtccttggctatagacaaagtctccgatagctacaccccgggctatttaccgataagtgcccagctagctattaaagcaaagagatgaagcaatagacgtgaggtcagtgtccagaatggccggcgtggcaccagtatccgtctgctgccgaccggaaatgtagtgcaagccgttgaaaatactcgcggagctccttttcaatgttatcctaggataacccagcaggcagcggcgaggcaagaagagaaaagagcaaaagttcggcaaacatgatgaagcataagaactagaagaaagaaagaaagaaagagagaatgatagatatgataatactacagacaacaggtctctctctaataggtttaaatgtcgctgaactgtacggagtagttactctcctatgaaagataaatgcttggaatcaaaatgagactacaatgcaacctactacgacatatactcgggtttcttcattaatctgatgcatagaatacccccaagatgcaatatcgttcgctacacccttaaaccgacttcatcttagcattttaaaaagactaacaacatacctggtacattcggtattgacccatttgggtaaagattgtccggataattattacctagataggcataatcgaggcggattgccctttcgggtttgggcgccgcacggttaaaagctaaaatcatattttgtacaacggaactcaaatacgtacgctcgcctggaaatcaacggcggcgagatttctcttgttgtcacccttcggtaactagagtggtgtgtgctttttcatgccggacctaccgaaggatcaaggatcacccgactggcttcgtggactggttgcagataaagtgccttgccaggtagtgatgtgaatactgagcgaacatatgcaattggaacgctggagcatacatagctgtgcgcattcgtggaccttaatcgcggtctataggaatgttgatatagatcatcactggaactacgcgttcaattgcgttgatacgactattagtggggttgctacaaatccaccttctcccgcttgtccatatacacgccttgtacaacggcccctcgaaaacgacatgatctatgattctgatcgttggacaaggagatcagctcccggaactatctatgagcaacgtcatcgatgcctgaggccataatatacacgtggtcgtaaagtacattcaaagttatcccaaatttagcttgtttcaccttagtggagaggttattgccatgggaatatacgcatggtatggagcagaatcgtcagatgatgtacatggaggactatccgggatctagatccttgtactccgtattcgtggcagtttagttggctacgtgggacaggacactgaaggtatctgatacctgacttgatacccaaatctggcggggaagggctgtacccagtacccactgtaattttgatgcaacgggccccatgatgagatgagatggaaattaaaagcacaggcgtagataagtaagattaagcgaaaagcacttcataaaacccagaactacaaagtcatctatactcatagatcgtgcagttcattcttatctggtggttttgatccccgcggtgattacatacgtgtttccgcccctgcttctacagggctcgtggccatcagggatcggtaatcgatcagcacagcttcccccgaagcggaacctttctttcttctctcttcaactgctttctcgacggacagatgttgagtcgccattcccgtctctctctctccgtgcgtgtgcctagagtctgctcattttgactcaactccactcaccccatttcttcatcttcccctccccaaacccacagggaggttcggatttctctctttcttcgtcattccctcgggattgaaggtatgctctatcaagggctctgacttctggtctagtagcttctataaatcctcctgaccagatcctccaactccgtctgtcgcatcccggtgaaggcggcctgcttcacgggtacacacatcatcgggactgctggtgatgcaagcgggtgaacctcatggctaataaattctctattcatacagcgctagaccgcttcaattttcaatcgactttttctccatctccagtcatttatcggccgtgacggtcgagagcgtaccccacccgacctgcgcgacctggtctgtgttctgtgtgtggacaccacgcttgcttgccgctgtatcggcctgtcgcgcaacctctcctgggcacccgatctttcgaccaacccttgtaccatagactgctccgttacgacatctcggagacgaacgaaacgaatccatcttatgaattatttccctcgggtatatactccatcatgttttggcgctttgggggatatgcgaatctttccaccatcgataccctgctcgacaaacccgatctcactcttgaggaactcttagacgagcccgaaactattcaagaactgaaacagcttaatacgaaactcattgaatatctgcgcgaggatcatgccttgaaacggcttatggaatacgtcacggcaccgagcttggtgaatgacgacgaagatgatgcgaaagacacttcagagaagggcaaggatgatgccgcttctgcggagcagacagatatggacgaggagaaggaaggggatctgagggatattcttgacccggatgacctagacaaagtcgaaaagaagcgtctgacgcatgcctatatcgcctgtgagattctctcatcagagacatggtccatcctcgaatccatgatggccaaccctgcatacttgggcgaattctggggtttcctgcgacgacctcctcctcttgattcattgcaggcaagctacttcacgaaagtaaacgagactttgcttgataaaaagaccgacgagatgctggagtttctcaagacccttgatggaattgtcccagcattgttgcagcatgttgataacccgatggtcatggatcttctcttgaaaattatcagtcttgagaaggcagagggtggccagggcactgttgactggctcagatcccagggtttgatccccaatcttctgtctttcttgtcccccgatcgtccggcgtccgttcaaacctctgcaggtgacttcctgaaagcgatcatcactatatctgcaaacgcaagcccgaacgaccagtcatgtattggtcctaacagtttgacacgccagcttgtctccaccgagtgcgtacagcagctcatcgatgcgatgctcaagggtggcaatcccctgactgtgggcgtgggtattgtcatcgaggtaattcgcaagaacaattccgactatgatccggagtcccttggcggacccgatacaatgctcaccacttacgacccaatctaccttggaacgttgctgcgtctcttcgctaaacatattccccagttcatggctctcattcaaagttcccagcacactattcatgagggaaataagctcaagactgttgagcgaggaaagttgaactctgcttggggtgggcaaattgagcctcttggtttcgaccgattcaagacgtgtgaattaatggcggagctgcttcattgcagtaatatgggtcttctgaatgaaccaggcagcgacgagtatgttaggcaacgagacgaggagcgtgagcggttaatccgtgaaggagggttcgatacgcgaggcttcgatacacaccaagatgagcattctggagttgataccgcggccgattttgcgaacgattcagccctcgattctggatccccagaagatgccaaggtcacagaagtgccacacgtgggtgaagatgacggatttgaagatgttggcgcatctggtgatttagtgagtgcaaaagctgatgccgacacaacggctactgcaaactcgcagccgacggaaacggtcagcgaaacctctccatcggaaatcacagagccagagccggtgtcttccgaagaaaccacggataaatctgaaagttccaccacacccattgatccctcgtcgcctactactggtctctctgatcaagtcagcgccatgaatcttgaaagtgaaccacaagacgagcagcaggagcctggaaaggacaaccaggagcctgtggcttccctctcccaagatgttccagctcctctcttctccaaggaacaagcatccgagtcagactccgccccagccgatcaatcggaagaaccatctagtcttattgaacaggtcgaggaaacgagcgttccgaacgacggaggcgatgaggactcggccgaacaatacatccaactcgatactgacgggcgacctgtggtcggcgattacctgaagatccagttcgtggagaataaagttgtcccaacgattctggtttgtatttcttttagagaacgttgaacacccacgctaaccattgatagggcttcttcttccgcttcccatggaataacttcctgcacaatgttgtttacgatgtgattcaacaagtctttaatgggcccatggagcgtggctacaatcgggcactcgcagtcgatgtatttgacaccggacgaatcactaccgcgattgttgaagggcagaagcgcagcgatgagacccagcggactaagcaaatccgtctcggatatatgggacaccttactcttgttgcggaggaggtcgtcaagttcagcgagcgtcatccgccagagttactctcacggtccgttatggagagcgtgttgaatcccgactggattgagtacgtcgaacaaactttatcagagactcgcgaacgcgacaatgctattctcggcggtgttcgtcctgatatatcggttgggcctcgccagactagccttaacaacaccaactctggccaaggcttctctaactccgctctggcggacgtgggattgaatggaggaatcggtggctcaaccttccagagtttcgacctcggccaaggaggtgtttccggtggagcattcggcggaggtggcacctcccttttgagtggctttgccagctcaagcgacgacgaggacgaagaaatggaggaccaggacgagagagactccggcaatgccgatcaaaatgacaatgacaatgtgggttacctcttccgatggacatgatggtgcacgatctcaaccgattccgtgcatcccccattatcttcaccattccttcccggtttacccctcatgtatcccaagctatagcaagggccaaagagccagaattccaggtaaagtgctggatcgctagtgcttgggcaatgtgggcttgactaaaactggtatcatgcctgttagctgatgttcattgccgatatcgtgttgcaaatctcagcccaggggaggggggattctcgtgtcactttgtcctgaactgggtttcttatgcacttttccctttccctttacaaggaatgggctgtcagatgtattgtctttttactaactgactttctattaaggtgttcacaagttcagccagtcaacctattcctatcttacccccgccacctgctccattgagcttgggcccttcccgcgcacgccgtcagttagccgcacgtcttgccgctcaaaagcaacaaccatcagaaaatgaaggcgacggagattacaggggggccgaaggaagtgaggaccgagagtcagattggccggataacccattcgtaattgcagggatcgatgaccccgccgacgcaggcagctctgcgttccctaatagtgactttggttcagccgatggcaaacactcacctaccttcccggaatcaggattcagccctccagactcgctatcaactaactcatctgaagatgaaggtgatggccacgcagaatccgtgaggcgacaggttcgtgtccctctagaagtcgaggatgacgacgatgatgaaatgggtgagatggtcgggccgagtggcattggcatgatggactccgacgacgaagacgaggctatcataaacgaatctcttggttactccaacctctcgggccccgcccgatacaacaacttccgatcacgagccgtgagctcccattatgatgatgagcaaaacgacagcagtgatggcgaagatgatggattggtggagataatggtccctggccgcaaggcctcgacctcgaactaagcctgggctctttgcatttgatttcgtggccatgacggtaaatcccaacggcaaaaaccgtgggggcgagtcaccgttgcggcatggcgtttgtatatagactttccatcgatggagtagccatggggttctgcatggagagctttctgatctgatgtcttatttgtgtccttgcatgtattcgcatgctacgtgcctgggatcggcttacgagtctgtggcttttgattggtattcgcttgtgtacgatagttgtctggagaagcgaattgatttattttgagcaaatagtaggaaagcctatatcagcccgaaagtatcatttcgtagatcattcttataagacgcgcaaaaaagaacgttgaatctctcggagaaaaaagcgggcccccaccatcccgcatcaattcttctcaggactttgacacaaccaagtcggttcattcttggataactttgtcggtagcaatcagtcgtgcctgtgagaaaatatatccaacaaaaaaaaaagatacacttgcttcaaaaatggcagcttcctcggagtaagtgcagtctggagatacgtcattcccaagcgtatatctaacacaaaacagacaagtcgatccaagtttaaaagctcacacagagctagtgaactggttcatccagcatggtggcacggtcgataagagcgtgcgcattgcacaagacgcctcgcgcggcgtgcacctgcaagtgagagcagactggccagaagccatccgaaaagagacccgagtgatcaacaccccaattagcgtgtcaatgtcctggtacaatgcaattggctatgagtcaccacggggctcattccccaaacacggcgttgactttccgcggacatggatcgacgacgtcgggccggaggagacttttgccttcttcctcatgggccagtatctacgcgggcccgacagtttttggtatccgtatcttcgtaccctgcctcagccgggtcaattgactaccccgttgttctttggtgaggaggatgtagattggattcagggtactgggattcccgaggctgccgttgagaggattaagatatgggagcagaagtatgattcgggctatcttcagttggatgcaatcgaattcccggattgtgagcagtatacgtggtgagtacgagatactgctgtctctgttattctgcccgaggatgacattatgctgatttgtatacagggagctgtatctctgggcttcgactatcattacctcccgggcattctcgtcaaaggttctatctggggctgtcgagcctggtgatcttccagaggatggagtctcggcgctgcttccgctcattgaccttccgaatcatcgaccaatggcgaaggttgagtggcgagcgggtgacgaggatattggtcttcttgtgcttgaagatcactcggcaggccaagaaatttccaacaattatggccctcgtaataatgaacaatgtacgtatcccatttgccggggcgtgatatccgagccttgagaacgcctgaatcatcatagacactgaccatatgatagtgttgatcaactatggattctgcattgccggcaacccaaccgattatcgcattgttcatctgggcgtgaagcccgacagcccgctcggcgaagccaaggctcgccagctcgaactgttccctcaggttgccaagaatatcgaggaccactattacatcttcaatactttctacccactactggctcccgaaacaacgatggagcactcgatcttttcaccggcattgttcaatgcattgaccgtcatggaatcaaacaaacgcgagcgcaaatcactcgagatcaccgagagctgtattcgcattcttccgggatatggaaacaaccatagtatctatgctgcactcgctcagattagcttcgagctcatggctcatgccgcaaacctgaaagccagtgcggagcatctgcctttgcagccaaccaccctgaaccagatccactctcagatctaccgcaacggccagataacattagaccaggctgctttggttatcgctacttggactattgcacgcgggagggaacataagcgtggtgaaagttgggaagataccaaggtcctcctacatgaagtaatggcacgcgtcccggccggccttctctcagacgaagtcatgtcccggatccgagtgcgtatcctagaacgtccgtccctgatcactaaaaatggtgaactgttcaggttaggcgaacttttcagccttctgccggctgaaatgcaggagccggctcagacatgcttccagcacgccctgggagaggctagccaggccgttccgagtatatccacagatccacagaccctgtttgcaacggttatttgcttgctggttgcaacgtataattcgccagaggcacggtcaagattgtcctcgcgtctcaaccgatggtttactttcctgctcgagcaataccctctgccttccagatctattgagactggtgtggatgaagccagcgaaacacttcgtcaattccaaagatatactacggcagcacaaccaagctcatgggcacctggtgatggggttaattggcttactgaggacagcgggtggttggactcggagtggcttcaatggtcatggacggtggcgggctcagaaatggtgatgattcctcttgatccatttgagatcctcaagatggagggatcattgtctatgttgaaacaggcatgtctctatgtaccacaagagtagataaagaggaagtagacatagaaatgagcgagtcgtttatggtcttcgttaacaatcctctctcttaaccccgataaatcgagaagaagaaaaaaagttagaatagacgttcaagaggaatttcgaacaaatgctagagaaataggctatttaactggccatatctttatgtatatggatcacgtgatatggcatagttataccatcctaatgtggaattctgactcagcaatattgtcacgtgtgagcatatcacccaatcatatcgagcccaaaggcggatcattcagcaagcgcaggaattgccgtgagctccacgactcccttcccttctactccacgaccctttgaccctcactacgcattgtcacccccgccgtcatcatgatatccagagcggcggctccctccacctcctccctctcccacctctcgatccgctccctccgcgctccgggggcggcagcccgctccttcgcatctgtgtcggaggcgcctcccgtgaagcaccatggcggacttaaagaccacgatcggatcttcaccaacctttacgaacatcatggaacggatttgaagtcatcaatgaaatatggtgattggtaccgcaccaaggatattattttgaagggtgatgattgggtgggttgtcgcacaattgacgatctggggaattaccaattgctaatcccatgaccagctcatctcagagatcaaggcatccggcctccgtggccgtggtggtgctggtttcccctcaggattgaaatacgtaagtggcccacacgcaattcggacaaataccagtgctttaggataaccgaactgactcgctactcgatagtcgttcatgaacttcaagggttgggaaaaggaccctcgcccccgttatttggttgtcaacgcagatgagggtgagcccggtacttgcaaggaccgagagatcatgcgcaaggacccccagaagctgatcgaaggttgcttggtggtgggtcgtgctatgaacgccaacgccgcctacatctacgtccgtggcgagttctatcacgaagctaccattctccagcgggctatcaacgaggcctacgcggctggtctgatcggtaagaacgcctgtggcactggatacgacttcgacgtgtacattcaccgaggaatgggcgcctacgtttgtggcgaggagacctcgctcattgagtctattgaaggcaaggctggcaagccccgtctcaagcctcccttccccgccgcagtcggtctgttcggttgccccagcacagtcaccaatgtcgagaccgttgctgtgacaccgaccatcatgcgccgtggtgccagctggttctcttccttcggccgtgagcgtaaccacggtaccaagcttttctgtatctccggtcacgtcaacaaccccgtcacagtagaggaggagatgtccatcccgctgcgcgagctaatcgagaagcactgtggaggtgtccgcggtggctgggacaacttgctcgccattatccccggtggctcgtcaactcccatcatccccaagtccgtggccgacaaccagctcatggacttcgactccctcaaggactcccagaccggtctgggtacagctgccgtcattgtcatggacaagtccacggatgtcgtccgcgccatctcccgcctgtctaaattctacagacacgagtcttgcggtcagtgcaccccctgccgtgagggcagcaaatggaccatgcagatgatgcagcgtctcgagaccggcaatgcccgcgagcgcgaaatcgacatgcttcaggagctcaccaagcaggttgagggccacaccatctgcgctctgggtgaagctttcgcctggcccatccagggtctgattcgccacttccgtcccgagctggaggcccgtatccgccagtacgagaaggagcttggcggtgctcccttcgccggtggctggcaccccgacagccgtgctgagggcaagttgatctcccctggcatgtaaacgcacctcccacctttcgtttttccatttacaaccccttttctccctgtgttgtcccctcaaaaagaagcaggaacaggtcgaggatgattatcgcttctagatccctcttatatctccctctccctggccggtaatgttttctgtctgtctggtccagccggggagggtggcgtttctcttttctttactcagcccgatcccctcgtattcatctatcgcgcctaggtttcctttattgtacagttggtagcaaatttgatgcatttgatgtcttcattcgttttatgtatggcgggttttgggtccatcgtgccaactggatttctggccagaaggttaaccatctgccatgaatcaacattgatatatctgtagtctctcaaaggcctagaaggagaatagataagagcggaagaggatctaactaatcgacgctagaagtcctagatattgcaaggtaacaatcttgattcttgataatagtcactatatcgcagccttcttactaccctcactagccataagatagtgtgttacgctgtcaagctactatatctgagaaatgtcgaagtccatttcgatgctccgacaagaacgaatcaacgtttctcttctcacttcatccaactaaccgttgagcaagcacttgacaaggccattcgcctttcacattcacagtctcgaatctctcaaacccttgagactcatagtactggatcaattttccatcgccacccgcatagcaatctacccgtagtaaagagaccccagccttcctagcaagatcacgcgcatggtccaagagacgtctaccaatctgactgccagcacattgccgatccgtgactaataaccgcacgtaaagctcaggctcagagacaggtgtcacatagggcattttatccccaagagcgagcgcaccgacgacgacccccggctcttctccgttcatagtttgggcgagccaaagaccatggccggttgttgcaaattctttgagttgctcggcgcgttgtgggttctcggaaaaggatgctgttccccattgcccggttctgttgtgcgatactagccattggactgcggtgtctagaagatggaggactgccgggacggcgtctgctgttccccgcacgatagttatgtcgtggactccattcttaatcgggcttttgagatttttgttagtatctgtgagtggcctttcgcttttgttcttcatttgatattggccccttccgatctacctcttctcgggtaggttggcgctttgaacaataatacttactttgatgccattatccaagcagtctgaagggacgattgttgtaaaatagcctcaataagctcaactagttgaacttttggggggatctttggaaattgtcgagtgagaagtcctactgtacatcctggagcggagataggtaaataaaggcttggcaatgacgtaatctcactgtgcattcatgcaatcgcaggaatgtggagatatgccgcgagcgatgtagcatatccccattttctccatttccatcaagcgattaataggcgaatcaattcagtaacaacatagtctctcacctcggaatatcagagcgatgatctcccgtcttccgcttcactccgttcttctaggttcttcagcgacattagcatcattagcaccagcaaccaattcctgaacattagtatccttctgttctctcccatcggcctttccttcgatctgaatctcagcagctctcgcatccttctccatcttctgttcgatcttgagcaacctcttctctctccagcccatcccatacacattctcaacccagagcagccccattccagcagtcatggccaagcccaagaaaaagaaacaccatccccatcccatgccacttagcatttggctaatgaccgcggcaccaacagcgccaaggcagcagcgaacaaggttgcatgccgatgcagctgtggcaggcttgtctgggaataggtcgacaagaagggtgttgaggcagttcagggccgcaacgaagcagaatcctataatgaattgcagcaccagtggagcggctaagtgtactctttgctgcagcacccacccgtacgggatgaatgctacaacgccgatggccattgcggggaatactgtttgcaggcgagtgtgctcgatcggaaaactgcgcaaatcgtcccctttctggcggttcactggaaatccgagcttttgggctgtccgcttgtagttgtagtcaatgacttttccatacaggactgcgccgaggcaagagcttaccccgaggggcctgcgagtttgttagtatggaccccggggtcaggaagatgaggcagacatgaagacttacaagaaacagagcccaatctggagctcgctgaatccatacaggggaccaaagagattaggagtgcttgttaacagagcgatattcgcgaacatcacaatcccgacgtacgagatgatgatcaaggcatcccactccagtagaatgacaaaggagctgagaggattcgggaacctaagtctcttagtatgcgaggactgttgttgcgacccttctgcatcagtttgcctttcctcagactgtgtctgcctcttcgaccaccattggataaccgacctgcgccaccactcgttcggtactgcacggccgtcaccaacaattttgcgtgccgtctccggcatagtaagcacatagaacaccaagtaccctccactaacaatgaccaggaaccagaagacactgcgccagccgaggaatttggccaaaagaccaccgataacagggcccagcgcaggcgcaaccataacacctgcagccataggcccgatatatttcccacgctctgctgttgtcgtaatgtccgctataacaccatatccaaaggccacggtgccgctgctccctgcgctctggagacagcggaggacaatcaacgccgcgaaactgttttgtaacgccagtccgatgttagcagcggtgtacactgcgaacgcaatgacatatgctggacgtctacccccggtgtcggcgaatgtgcccatgaagctcgggactaggccttggaagatcatatatgttgtgactgtcaggttgatcagctcgggtgtaaggtggtaattccgtaccaatgttggcatgaccgggtagtagatttgaccggaaagtggggagaagaacgacgcaagagtcaccatcatcacgatgaatgacctttcgtatttgctgaatgccgaaaatgatggctgggaattgtccggtgctgtttctgtgctctcgatatgtggctcggtagctggcgagcctgagtcttcgggttgaatatggtcgttgttggcatcgctgggggatgtatgtgtggttggggctgcgacgggtgcttcatcaaacccgccatatccactatcgactcgccttatattgcgatctaccggggtgtgctggaagggaccaggtactgtcactgtctttccctcgcgagttccttcagtcaggtgcagctccatgatgaatagtgtgtaataagccggatagaatgataacaggtggatatgagagaggtagagaggagagaagcagcaaagtaccgaattatactccgtgactctttcttgagtcgtactttccccaaagtgtcgcacaactacgttctatggtttattgcaacccattcggaacggagtagctaggcttcttttatactatccaaatttatgtatcactttgcaaggtgtacggaactatttagcatcccagagaaagtctagcactaaataaaaaccactttgttatcatctttatcggtcttttttgaggtcttttccacggtcctttagaatgaataattaccccctggtattatagcacttatttttgtcacaaatgtaccaccgacctcattgacttgcgaaactccatgctcggggatcctacttctgggtgccctaatagaaatatgcagtacgatagaacaggtgtaatttcacagatagttatgtaattctctaagtcattaaaataatgcaaatacaattgaataataacaacattcacttttgagaggttcgatcgcgagtacgaggtgcctatgcgccactgttgtgatatgaggctggtgcagatcagaaatcaagccacaccatcggaataaattcccacattgcctatgttgtatacgaagaaccaaaatcgaaaattaacttgatctactcgttgtatatataagcttagttattggagtctaggttgtgcttcagtgtactcatgtatagcatcattcatgtctaatacgagagattaagggaaccggacttgtgcactagcaagggggatagaatacagatgagacagatagtaaaaagagcagaacaaaagaaaaagatcagtgcttgggcgttagatagttagtgcccgctaatttcacaatgaacataggcaaactaggacattattctccttatttcctcaagacttaataaccaccagccatgatgacgccgtagtatcgacggctcatctctgcggtctgcaaaacgcgagcgtcacctgtcaagggcaggcccaggacagcggaagattcaacggactgtaaaaagacggaagtcagtaatgaacgaaagcaatatatcagcggaaaggagggagggaactaacatgaacatcttcgtgtgtaatccagccggcgacagcccggctcatctccttgaatgcaacacgctcctccagtccttccagactggatccctggacacgatcgcccatcgcaacaagagcgttcactaggcggttcaggcgaattggatcacgtcggccgctggtggagttgacaaggcggaggaaatcttcataaacgccgccgccagaagaccagccgcgcattttacgctcaggcgcgtcaccgaagccggagaccagagtttcgagggtacggtagtcgccctcgatgatggtgcttgggccgacgatgcgacaaaaggtggtgtgggcatcgttccagtgcttgccgcgaataagacagtctacctcacgggcagaatcgccgatgtcgcgagcatacagagccttggcaacccagatccaggcttcgggaagctggagatcagtgatgagatattgccatgccaggtcggaggagccgtcggcagcgaagggctcggggagttgagcggcgaagcgggcgagagtttcttggacagcgccctttcggtcgttaccttgggagaggtgcaggaggacaaacaatgcttgatcaagctttccgcctgcactgagttcagaagcaaaatcccggacgagttggtcagtttggtgctggttgattttgatggcctggttttttccgactaccgcagcgagaacgtggtgtagctggaaggacagtcggttggagagacggtcaccggagacggattcgggaaggaaagatgcggggaattcaacgggttgggtgacgtggccttgaatcgccgagaaggccttgagcagaacccaaagaggagattcgcgcccaagggtgtcagagccaggctgcgggactgcacgggtactagcctggtgcgatgggtgggggaaggcgggttcttgtccggtggccaagtccgcaaggaacttggagacagctacctcgattggctcatcttcagccgtgcaataccacagacgaagaccaaaggcctggaaccaatctaggtcgaaccgctcggtgaagccaaagctggaggcccggtcttcaagcgcaccgcccgatttgccttcgctgcggagagcattcccagcgaccagttcgtaaagggctcgtatgggttcagtcatctccgagagtatgttgttctgacgccacacatcgatttggttcgctatgtcggcacgcgaggtagcatcgcggccaatctgtgcgactatagtcgccagatggggattttgactgtcaatcagtgtcttacaggcttcctccactcggtgcgaacagatcaaatgaacggcccgttccacaggggagcgaattgcatccaggttttgggagtgcttttcacgaatgattccctcccaaagacgagtgagtcggtccttcctgatccggtgcgcaaattgctgtcgtaggcgcggcggtacccccgctgagatatcgtcctcaatatcatcattgaaaagaatgttgagaagctgccacaccaagcgctcttcttccgactgggaacgggtggatggtgacagagggaactgcgacaggtcgatcctggccatacgaacgaaaggggtgccatcaatgcgctggatagaggactgaagccgctggacatcaagcatttccctgacctgtatcatcattagtatccagttcaataaaccaataaagccactaaacctacctcgctagattggttgtatgtcatgactgcaatatcacggtcttcgctgaaaatggagaagctttctttccaggtctggttcacccctaggattgtgtcccccatatcatttttgacacaaatgagggaatccatgggaccccagcggggtttgaaagagtcatggaaagcggcatcggattcgctcatttgtgttgtatcgccagcgaaggtcttgggttgcttgttgtaaggccactagaggaagaaaaatggttttagctcaggttatcacatttgttaaactatctgaaaagtgacgcgcaatttcatagatacatgatgcagtgagaaaaggaaaaaaagaaagggaattataatcagtgtgaacataagaagggagttctaacctcaaagccctttggcgttgctttagccttcagcggagaaggggcggcttgcttgcgcggctgctggaacaaagagttcataagatcaatgctgtttgagaagcctttcttcggagatgctgtcgcaatgtttgtgggagattcatcgttcacgaggttacgatcaatgaaagcgcttgcctgcatttcacgcaaggcatcacggttctgcttgcgagggctgatggtacgctgcagctgctcggcccagtcgccactaagatcaagctgaggctttgcgggactgccgaagtgtcttgacatatggtaagtggtatccaggtcaccattggtgctctgatagtcgttccgctccacggtgcgatgaggagtaggaaaggcaccggccatatccatttcatctgcctcatctgatccaactaccgaatcgccagactgttggctctcggtgacgacgtcgtcgtcattctcagtagtcgaacccgtggagccttcctctaaaaaagactcggtttcaccgtcagaaaaataatcatcctccacaggcatggcctggttagcgaaagagccaggaacaagcttgcgctttttgaagtcgaaagtatcgtcttcaacaccaatcatggaaccgacgaaggactcatcgatagaaaaggtagactgatcgaaagacgcggggtcgaagtgagccctgctggtagcgtggtcagggccttgggcactcatggtgctttggtcgtgactctcaccttcctcttcatcgtagtcaaggccatatgtagtgaaatgaggcaccttgaaaacccaggttccagtctcagtttcgtagttaacgaactcggtatcgcccactttctgcagacgatcaatgtgtttgtcaaacagaggaccactagtgacaggcgagttgctcttcttatctctaccacggggccaagagttctcaatccgtagggtagatggcacgttcagtcccttgcccctggcaggcttgaccgattcctcggggtagacagtaatcttgcgaagaccaatatccacaatattggagaaaagattgtccagatcaacggtagtcagatcaacggggccgttgaaagtaacagaaccacagttctgacggccaacggtgaagtcaacgacttgtctgagctggtcgcggctcatcctgctaagctcggcacgggaaggttgcatccagtactcaccaggtcttgggtcaccaccggggatgaacgtaagacgcttaacagtagcaccgttggtggtttgcggtgcactttcggggacaacggcaaggtcacggcgggcagattcggcctcgggacgatcagaagtgccggcagcatcgaaaccattcaggctaccgctcttacgcacagagcgaaggaacccaagctcctcagcagagggctcggaactgttaggttcaacgtgaacaagttctccgccattgaccccggaggtatgagagtcgaagctgacctttttcttcagcttgtcggaagaatgggcatcttctccgttagtgagcaggggggccggggtgtgaagaggggccggggcaatgcgagaggtcgagaatatttcatttctcagaccacggttgatagtgagacgcttcagactgctgttaccacgtacgctgccagcctgcagggcaccgggagaaagaatgctgtccgcctctggatcgaaggtcttgcgaaggttgctagtggagtaactcttgctgaagctacgtccaatgctgccattgacgctgccgcggagactgctactgcccccagcaccacccaacaaactactaccaagaccagatgaggcaccagtgctgccagatggcgagccataggtagaataggagaaaccatatccacgctttggaggggtgatgagtcgattggcagcgttgggagtaattctgtagaccggcaacggagttcgctgcttttgcttcatgctggaagacagtggcgtggcaaggggaccgggagccgatccaccaggggcaggaagaccagagaagatggactgacttccatacgggtttccatcaagaagcgacgcttggaagctaccaggggcaggctgagactgttgtccgggcattgaggcaccgaaagcactgacacctaggccaccctgcggttgctggttttgaccaccgaagagcgaagagccggcgccttggcccgtgttggtttggccgccgccgaacatgccgccaccaccagttcccgtagtcgaggaaaagagaccaccaggcttctgctgctgttggttctgcgtgttgaacaagctactaccgccagcagctggctggggctgcgaggcaccaaagccagagaaaccacccgtggtgggagctggggtagatccgaagagaccaccgggcttttgttgattctgtgaaccgccaaatagcgtacttccggtaccagcttgctgattttggccaccgaagagtgagctacctccctgctgctggggttgctgctgggctccaccgaagagcgaagatccagcagctggagtgctgccagcaccgccgagcaaacctgttccggctccctgttgcggggtgcccccaaatccgccgaacaatgacttgggttgggtttgagcttggttctgttggtttgcaccaccgaaaccaccgaaggcacttggtgcttgctgctgagcaccaccaccaaagggtgaggctgtggcggtcggagctccgaacggattcgcggcagtggttgtttgggtattaccgaaaccaccgaaggcgccaccagttgtaccagtggcgccaaaggcgggcttgttctgctgttgctggttgttactaccgaacaaagacccgccggtgttgccgaaagccgatccagtaccggtgttgcctccgaagccaccagcggtctgtgtggctcccccaaagaggcttcctgatgaagctgcaggagtagttccaccgaataaggaagttgctggtttggctgctgaaccgaacaagggattagcaccagtggagccgaatccaccggcagtctgggttgcaccgaagccggttggcgcacttgtggcagcccctccgaacggagtggtgctagcgccaaaggcaggagtagctgttgtattttgttgaccaaatccaccggttgtggtgttaccgaaagcaggagcgccaaaaccaccggcttggccactgccgttgccgaaacgacgaccttgttggtaatccgctaggcgcagttcctcgaaagaccatttactgtagggttgcataaaacagatgctttggtagtggttcgtggtgttggctgagctggtatccttctcgttccagggactgaacggggtgctgccagtaccttcgcagttaggtagacctccttggaaagcagtacctgagccgccgaaacctgtgctgggggttgtggtgggggcagcggtagatccgaagccaccgctagtgccgaatgcgctggtaccggtagcagtgccaaagcccgtaggtttggcaccaccgaaaaggcttccacccgcaggggttgcgctggcattggcgccaaagccgccagtggtaccggtagaaccgaatcctccaccagcaccgaagccgccggtggtaccagcagtctgagtgcctcctccgaagagagacccggtgttaggagtgttgggggtgccgaatccaccggggcgagtttggccgccgaaaagggcattaggttgttggggtgtagtattggttccgaatcctaatgaaaatcaagagttagcaaacacgatcgacgtttcaatgaagcgactaaacaagtgcagattgatgaagagtggtcctggggcgcatgtcggtggaaatgtgggcaagtcgcaggtgtggagattccaggggggagccacgagcggtcattccagggggaccgaggagcacattcacagatcccatgtgcgcgagcggtcgtttggatcgcaaggccacgtgatgcgacgggagacctcgccagggaaaatcgggagggcagcgcaaagctcacgattgagcacgtacctccgccagtgccgaagccagtagatgtgctaggggtgctaccgaaggcgcttgaagtgccagtagtagcacctccgaacggggaagctgtcgagccaaagcctagatgacggaggggatcgcggtcagagagacttggattcgaagaagctcttgcattccttatcttgttgtggtgtcgctaatgcatccaaatggtccgctggtgaatttcaattgcacggcgaagcttattatgttgaagttttttgtcttgcgcgtggcaccatcgcgggtcggaattaggagcatcgattgttgatagggaaagccgaggacacgagtagaatgggaaacatggggatatggccccaatgtacaaggggaattcgaaaagggggacagaaaagacctacctccaccagtgctggtgccagctccgaagccagtgccagtaccaaagccgctgctttggttgttcgaaccgaaccctccaaatccgaaagacatgatgtcggctggactttgtcgggtgttcacgaagtcataggttgattgcgcacaatttcgagagagtgcagatcaatagaatgagacttgcgagaaagggtgcgcggagatgaagagaagagaggagacgcgacagaaaagaagagttaagtttgctggagacctgtgttaggtaaggtccgggtcacagtgatccgtcacgtgacagctgcctaaatcggtttcttccaatgaatgcgagcaaggacaatagatgataacaatagagttgtttttgatctgtttattgacgggtgactcattgatgcatactgcagcttgaggtgagatatcttatttatcgacaagtattgttttttattcacaattgatgccaaggtgaaaccttatgtatacatatctacttgatctagtttacatcccactctaattctttccctttcttaattcttgctgtattcatgacttccaaatgatccgtcagttcctacaatatttaaccaaagtcttacttccaaggcttatatcgacatgattgattcctatcacctctaaacacgaagaagaacgtatagacaggcccatatgcgtctagtacctcgtaacctataatatgacacatactagctccgtatagatgactgccatccaatcaccttaaatctcgagtgatcggtacaaccacgtgcgcatatcaggtggtcaccgctgtagaccggactcccacgcgccgaaggcaactataaaaacacagcctcattgctatgatttcctaacctaattcgagataagatagttactactgataattctcaacaaaagctagagagttcataggttattcacatgaggttggttcgcattctgcatgagagaccgcaagccatcattaagagagttgagatctcgcggaggttatgtaggtccacgacgagacaacagcgacttatgtacggagtactccgtaggaactatgtgcataatgccatgccgactacatccaatgggggctagggcaatgcaggtaagaaataacccctcattgggtatgtacgaactcacctgggcataggaggataggtcccacgatagaaggtacccaccgataaacactatacctaattgggatgggccttccaaggttggcatcttggattatgtaatgtgccattttcggtctgaatccggcagaattccgactcaaaggcggaaggcatagttaagccaataggagtgcttccaaaagaaaaccaagcactaagcctaattgggaagccttggcgctcccgaggtcttcattaaagagtggggttgattttaagtctggctgcatccgggtttgcccagggtttggtccgaggtaagtcatgcaagacgtttacatgcaactaatggattgttttacaattggtacatagatattgaccccgataattaaacataaatccaaaacttcgaactcgaagtatatttgaagcccaaaaaaatactattcacatcgcttctgagcgagccaagggaatctcaagtacaagtagtcatcctgaaatcgggcaaaaaaaaaaaagaaaagaaaagaaaaccgcccgcatagtcgagtccgattccgacatgaatctggaccgaggtcgggggtgtatgatccactgaggatcatcgtgctacttccaaaatctcaccgggaattttgttctccgacgtcattatcatcaaattcatagaccttcactttacttctggcgggcggcgtggacggttgcgatgatcttctccacgacactggggtgggagagctataaagatgatttcgttagttattggtctagatatacgattgcaagtgttgaggattgtgcttaccgttgagatatcaccgaggctgtcctcctcaccgctgaggatcttgcgcaggatacggcgcatgatctttccactgcgggtcttggggaggtcatcaacgacgaagacggccttgggagcggcgaagggaccaatggacttgcggacttgcatggcaaggtccttgctgatgttttctgtcgcgctgccctccttgagagcaacgaaggcattgacagcctggccggtcagctcgtcggcaataccaacgacagcagcttcggcaacgccagctatttatagttagtataggctcagtcggaaggttctgtgattgcacttacggtgctcgagaagagcagcctcgatctcagcggtggacagacgatgtccagaaacgttaacgacatcgtcgacacgaccgcggatccagtagtagccgtcgtgatcacgaccagcaccatctccggtgaactacatatgagttagtatcaatcccataaagtgaggttgcaggcgtcttacgtagtaacccttgtacacattcaagtaggtatccatgtaacgcttgtgggcaccccacacggtgcgggccatactgggccacggctgcttgaaggccagaacaccctcgacatcgttgccaagaatctcctctccggagacggggtcgatgatagcaggctcgataccgaagaagggcagggaagcactgccgggcttggtgggggtgatacctccgagaggggtgatgacatttgagccggtctcggtttgccagtatgtgtcgcagatgtgagcttcctccttgccgacagactcgaagtaccacttccagacttctgcggcaatgggctctccgacggagccaagaatacgcagactgcgcatcttgtggtgaatgtgctcatctccagcgcgcttcagcagacgcagagcggtgggggcaacgtagaattgtgtgacgttgtgcttctcaatgacatcccagtagcgggagaagttagggtaggcgggggtactctcaaagacgacggtggaacagccaagcaatagaggggcgtacacgacataggtgtggccagtaatccaaccaacatcaccaccgcagaagtagcgatcatcagagtggatatcgaacacgtactttccagtcatggcagcaccgagcaggtagccggcagtggtgtgcataacacccttgggctttccggtggaaccggaggtgtacagcaggaagagagggtcttcggagctgaccatctcaggggcgatgtagttggggtacttctcgacctcctcgtgccaccaaagatcacggccagcggtccaggggacctcggcaccggtacgcttgaacaccagcacgctgtgcacatcggggcattgcttcatagcctcgtccacaattttcttagtgccgatgaccttgccaccgcgcttgccctcgtcggaggtaatgacgaccttagaggaggcgtccaggacacggtcccggagggagtcggaagagaaaccggcaaagaccacggagtgcacggcaccaatacgcgagcaagccaggaaagcgatcacggcctcgggaatcataggcaggtagatggcgacggtatcacccttcttgacaccacgctccttgagggtccaggcaacccgggacacttcgcgcaacaactctccgtaggtgatattgcggccctcgctgggctcatcggcctcgtaaataatagcgaccttatctgggttcttgagggcgtgacgatcgacacagttgaacgatgcgttcaagcggccctcgacgaaccaggcattgtcgccgttctcgaatgagccgtagtgtgtagtctcaaagtcgcggtcgaatgtgaggagctcgcgggccatgcgggcccagaaagtgtcggggctcttgatagattcttggtaaagcgtcttgtaatcttccatgtccttgaggtgagtgccggtggggtgcttatcgtggaacgccttggggacgtggaaagtgtcgacatcgtgtgcctcatgaacctagggcacgctgttagcctatgatccgcgggtctgatcatcttaggtaggtgactcttaccactgcgggcttgggaggcgaaactgggccgtccgacatgattgcgcggtccaatgggaatgattaatgcaggattccgtatataataaattctgcgcgagaccaaatgttagaggaaatgaattgcgaaaagtccagaataagaatggagcaaaagtgggaggagctctttattaatgcaaatggtggggttggccaaacttacttgaaaatggaggttataagttataaagcggtatggacaaacggggagagtcgcgggggggtatgtatagcaattagagaagagaaagaaaagaagaccaggaggggattcacgacattattagtagttccagcttgcccggggcgatgtgccactttccctttccttcccttccatatcgggggtggcccgtgcatggcagtatcataaattacgccaataccactctatacatcgtgtcttagccgcagacggcctctaatctacatgtacattgtagaactggactgctccacttccgatctccgaaatcaggatggaatccgatacatttcgagtacaattcactccagtcataaccccgtgtcattgcccatatgagtttgggttcggccatgcgggggtttgaacgtcccttccgttgctccggggtagcttgcccctccacgatatttgactaagatgctgctcgccacctcattggggcgtttcgagtcgggaagaaacgctagttggaccgaccacggcctagttgttctcgtgttcaaccctttgtccgagtccaataggcgggggccataatcttggcttagccatgggccaaggtccggggaatgtcgcgggccaggggagagcgggccacaggaggcctgcaagtcagtcacgtcagtgagattcagagatacaagtgtacgacttatcctcgagccccgcgagctgtgtcccgccaagccttccatgttgcgttcgaatataaaagacctacctcatgcatcccttgtatcgattatgctactcagacctcgggaactcagttggacttggatatgtcataggatgatgttatgatgtcacgggattttcggaccgagtctcccccataaaacttagttcgccatcgaggctcatcatgggaccggatcgccgacttcgggagccctagagaatgtggggtggatgagtcagcgctccaaacccgcaattggcgctgtttgatcggatgaccatcgtcgtctgaaactttgacattgcacgtatgtggtaatccggaggaatcaggggggattgatattaaaagattaacatgggcccactgttcggttacgagctctatttgatttactccgttcccatgtcgttactagttatcataattatcttattgttatatacggttttatgtattgtggggtaaatgagggtgagacaaaaagggggggtaccttgcagcactggggatttcgtctatcttactagccttactactcgtactatgtactacaacatttgtactttgtcctttttccagttctcaatgttgaactgggggaaatactttaataaagatccttctcctattctaggggcccatcctatctcttaccacgagtcaggtaataactagcctgttctacgatgtgcatcgtacatttgacggcgggatcttcgcccctctgtaactactgcatgaagatctgtggaatacacgaaataaccacgctgtgtagcttctctgctaaaaccaaaagggcagtctaagatccaccttttcccactcatttcccaacaaaaagaacaaacgtgataccgcacgctacaccgggtgatccgacggggtatgaagccgtattggacggtaattaccagaatacgatcctggaaacccagcggggagaaacccaaaacgggccaatcagcgcaacacaattttccatcaccaatatttttgtgggacgagttccctcagagtgcaagagtcccgagaaaagaccgcgttaactccatgccttgccccaacgaaagacctcgggaaacatagcgaggtccaattccaattccacaaggagtctgttgagaaaatggtccgcaccgaggcggttgtacaagcaaaacgggcaaaatcctatgcggcccttatctcttaaatatacggactacctacaagtagactaacggtgcgccacgcgtggcttacatccttttcggacgggcccgaacgactatacgagcattattaatctcaaaggtcgcgagcaaaatccgaggaatagaacgcggctagatcgccacggctctcaatactgccttgctagtcatgtcgattgcagggaggggccgccctctttagcctcggcatttgttcggtatagtcgtcagccatgttcctggaggtgaataattatcgtcggtttcgaatacgcagttaagagtggacgagcggatcattgggcggagcagggtgcggaagatgaagccagtcctggcttgtagcccactatggcttacaacatagcggcgatcagcttattttgagaggtacaacctaggcaggagatgagaccacctccctgttagattcctggggaagccatctccaggaaatccaggatgtctgacgagaattcccgagtctatctataccgccttcttatacaggtacaccgcccttcttattcaagtttaactggtggacaataacatttccggcaaaactattatcggggtgttaacctggagcggaccggggtaagggatatatatagccgacaaaaacacgggggactttcgtcatggcgtattcgaacattcttgcttttattgttcagatacaaaggtgccacttgttaacctcagcacgttgacttgaggatgttctagggtctatagtggttaactacacacacacaccacactggtattgagtcagtcctttatgataggaacaacgtttaacatttgcttaaaaaaagcttcaactctatacttcgtctgcatcttccatttttgatatgcttatttccaaccccctgtagagttgatagtcatgataagagatatttgggttcgatgttgcgggaaggcgtcccccttggaacctgcttatgattctcagcttccaccgtctgattgaaattacaacattttttttcagtagacggcctgtttgaccagtgtcactctatccataaaatgtacggcacaaaaggcgcaacacgcgcccttcattccaatacccggcggttcaccactaccactcgactacaagcaccatcaggcctcaagatcaatccggagcgcctatggaacacactacacgagacatgtaaatggggtgctgagcatcgctatggcgagtatgtatctatttcccattcggtcattgaacacaatctaacgacataaaagaaacccaacagatacggggatggctcgtctcactctcaacgatgacgatgcccgtgttcgtcggtggtttgccgccgaagtccagaagttgggctgctctctttctgtagaccagatgggaaacatgtttgggcggcaatcgggtcggttgaactcggctgcgccaatgaccgcaatgggaagtcatctcgacactcagccgcgaggtggtcggtatgatggtattctcggtattatggctgcgcttgaaattcttcggacaataaaggaaagtgggttccagactaactatgatatcggggtggtcaattggaccaagtaagcatcaagatttgttttatcatgccatttaagattgtcactaacaagttcatagtgaggaaggtgcacggtttcccaaatcaatgtgttcctctggtgtctgggctggtgcgattccaatccagaaagcctgggacctgcgtgatattcacgatcctcgtgtgactctccgctccgagctcgaaaggcacggatatctgggcgagattgcttgttccagcgatccagtaaccggatacccactcggagcccacttcgagcttcacattgaacagggcccaatcctcccaggaaacaaccgatcaatcggtgttgtccggggcgcccagggatacagatggttgactatgaccgtccacgggaaagacgctcacaccggaacgacacctttcagtgaccgccaagatccattactcgcatcatctaggatgattgcggcttcgcacgacattgccatgcgacacaacgcgctagcttcgactggtatcattcgagttccatcgaacgcgtctaccaacaccgtctcatcgcaagtgactttcacgcttgatatccgacatccgcaggatagcgtggtacacgccgtgcaagacgagtgcctccaggcgtttgaggctattgcattgcaagatggcaagggtgtgtcctttgactggacgttggatacggactcgccggctgtcgagtttgacgataattgcgtagcgtctgttcaggctgcggcggatcagctggttggtcgtgagaaatcaatgcttatgaccagtggcgccggtcatgatacggtttatactagcaagcgctgtccctctgcgatgatctttgttccatgtcgggatggtgtgagccaccacccgacggaatattgcagtccgcaggattggtaagtctttcttgtttctctggtgctttttcgaaatctgactgttgcagtgctttgggtacgcaggctcttcttgaagctgttgttcactatgatcaattcaggatagaggctgaagggcaaaagtaatcggtagttcaaatgtatcggcattaaactagacctagatttaactacggagtattctatgataatttcatctttagacaaaaagaatatatatcgagataagaaacgccaaatatcgttcttaacgacagaggccacaaatgccaccgactattcttttacattaaattcccaaaatatatatcacatacatgttgcggtcaactcgtcctgcacagagcagacgtcaatatcgtgagaaggtggagtccccacttaacctgccatgtccgcagaaggcgcaatgtctttagaaggctcacgataagaaatggttaggtgatatataaagtatttgcattaagcccacatcaaataagcatatttacgcccaccaacatgtcatcacgaaggtcgatctacttcaaccccgcggcagcaaatgagagcagtgccgccccgcaaatcgaaggcctaacagcattccaccaatccttcccgaactatgccccaaccccactagtccaactcccagagctcgcagccgagctaggcatcagcaacgtcctcgtgaaagacgagagcaaccggttcggactaccctcattcaaagttttaggcgcgtcatggggctgtttccgagcaatcgcagcgcaactgagcctgccctctacggtctcgctcgatgaactctccagccgagcaaaagaagcctcgattgtcttgacgacagcatcaatggggaatcatggacgggcagttgcgttcatggctcgcctcctcggtatcgaggcgcgggtcttcgtcccccggtctttgaaccagtggactcgggatctgatcgccggggagggggctcgggtagttgttgttcagggcgattatgaccaggcggtgcaagaggctgtggatgagacgcggatgggacagggtgtacttctcattcaggacacggcatttgaggggtatgaggatgttcctgcgtggatcgtggaggggtattcgactatgatgcatgaagtccagagtgaacttgctcggcttgggctgtcgggtagtgtggtgatcacgcctgttggtgtgggtagccttgcacaagcggtcgcgaagcattgcaagtcgcagaacacgactatatcggtagtcgccgttgagcctgatacggctgcatgtttatcttctagcttgactgctggaaagccggttactgtccggacttcatcgacgattatggatggtatggactgcggcacggtatcttctacagcttggcccgatctacagagtctgattgatgcctgcgtcactgtctcatcctatgagagccaccgcgccgtgcagtatctgacttccaagtctgtggctgctgggccatgtggaggtgcatcgttggctgcacttcgacgattggccacatcaaaggagggaacgtcacttttgaacaaggattctgtggtcgtccttctcagcactgaaggtgcacgcgagtacccagttccaagagacgtttctgttgacgatgtcgtggagctaactcaaactctcactcaaatcaactcttccaacctgaccttgtctgtaacagacggagtaggtgagactgaaatcgcaaactatctggccgcctggttcgcccatcgagacattgagtatcattggattgagaaggtcgctgaacggccatctattgtgggagtcttgagaggcagcggcggtggcaagtctctcatgttcaatggccacacagacaccgtcagtctctccagctacgaggcagatcccctgtccgggtcaattggaaccaagaatggcaaagaggtcatcttcggccggggttgcctcgacatgaagggagggttggctgcagggttagcggctcttgcagcaatcaaagcaagcggtcgcgtacctcggggcgatatcattctagctgcagtatcagacgaagaggatgcctcacagggaactcaggatgtgctcgaggctggctggcgtgctgatgccgctgtacttccagaaccaacgcaaggcgcgatatttactgcccataagggattcgtgtgggttgaagttgatatcctcggagttgctgcccatggatctgaccctgtatcaggagaagatgccatcctatatgccgggtccttcttgcagggtttggaggaataccaagcgcagctgccagtagatgatctcctaggacagagttcgctacactggcctaattcggggtggcgaagagccatcgtcctacccagacaagtgcactatcactgtcgaattccgaactgtcccagcacaaacggaacagtccatcctaagagacatcagcgcgctgctgaaggaaattgcccagcagaagcctcgtttcagatacggcgagccacgtattaccatgtcgcgccctacacagaaagtggcagctgatcatccgttcgtgcaaaaagcgatttcttgtgcctctgatgttctgggcagcaagcctgctgttaaggctggtccgttttggactgatgcggccttgcttggtgctgttggtatcccatccattgtgtggggcccggcaggagagggtcttcatgctaaggaggaatgggtcgaagttgggaatcttcgacagtttgagaaggtgtttactcggcttgtgcaggacttttgttattgaatatagacgtctgtatgtaagtactgtttagaagaacacacatagattatttttcaaagtttcccttgtacctatctcacaacattccaactggaaatactacttactactgcctcgtgcatttgatagtcttgtagtcggatagatcgtggtcgtagtccttgcgatcattgctacagtcggtctgaccgtctttcgtcagccgttcacctcctttcggtacttctcgtaggtacttcacgtcgttctgtttagtcgctctagcttcgtagggatgttaggtcgcttgctttcgtcgaggtttggatgaatataatcctagttgccgaggttttcggtaattgctaccacctattcaaactaatacagcccaaagaaagtattgataaatgggattattcaatagagacagtcaaacgtggtactagttgattcttgtagagcaagtgttgtgttgtggctggtgttcttatcgccacgggactacacagccagagccgatccagatcggccaccttcgcctgacgacatcccactcaaaatcgactagtacacccatctcgttgtttccattccaagcaaattgatatatattttcttggagatcccgcaacgatggcagacgaatcaccagcacagcgatccgcacgagtgcgccgagagcgccgggaggcaaagatcaaggaaggaggatcagcacgcctggacaaaatcaccagtctgagtggacgcacgccacaagctggtaagaaatgaaatttccatccccggctctagccaaagagctcctgatagcaaagcagacatacaatcccttcagcctcgccagtacaaacaatgctaactgaaatcaactacaacagaccgcgacgaagcctcctccccccagtccaagcacgcaatccctgaatctccctccccaggacctcaaaccccccagctcggactctcaccctcgccccaaccagacctgcagtcccaagaagcgatgcgcgcccagcagcaagcgttcttctcaatgctccgacaatccgcaccggaacccaaccagggcatgcatcccgacccacaagcgccaaacagcctccaggcccaacaagaagccttccgcacgatgctgagacaaaccacacaagaccaaggaccggaccaactacccgacggcgaagaccccaccatcaagctcctgaactccctcatcggcgctatacccggcggtgacccgaataccccaggagcacccccaacaggcgcaggcgcaggaaacccacttacacccggattctcgcccgccggcatcgcaaccatgctcggtgtgccgcctttccttgccaatatgttgaatggagcgccgccgcctacggaggcggagcagaagcgcgctcggatctggaagacgctgcataccgtttttgctgtgacggttgctgtgtacctgcttttcattattgggtcttcggttgcgttgttcggtagtccgccgccgaagcctgcgaccgtgcagaatccctttgctatctttgtgacgggggagttgatgttgactgggggcaaggtgttgcttggtgggaagtctggtggtatcgggatggcggtgcaactttgcaaggatgtcgtgagggatggtagcctcctgctgtttatcctgggcatggggacttggtacaatcgcgaatggcagactacggtgtactagatggcttgagtatgtgcggagtagcttcgttaatgatcagcggtatgagcatttcaatgggatatattttgtgatcattatttcattatcgtatgttgtatatcacttttgatcgacgctaagcagacatgttgaaggcccgctgagacggcgggaccgcattacgtagaacacgcaatgccgatgcatctaaaccccaatcaccttcccattgatccatacgggctcctttcttgaaatgacccgccagatgctccgcccgatctgaccaggtggacagcgaagatccacagaatccgcagcggctttcgacgttggcggtcgatccacgccaggcttcgaggtcagccacgggggctttcgtgcaaccgtggaatttgcgcagatgctgccatagataatcctttcgactgaatgaccgctcctgagtaggcttatcggcacagacttggaattcatgctcttcccaatgggcgaacgttgggaaaaggacgtcgcaaaagggacattctgaaaactggcgttcgaacgcttgttggacgtcgtggggatttggagtgcagacccaggagtcaagggtgaaatggacacttttctcgtggcgggcccagtcgtgtttcttcttgaaggactgtgggcagaatgtacactggaagggatggtctaccgccgttcgttgccgtcctcgggtgcgtctgagtttagtttgtttggggagtagtggaaatggcagccccgtgtccgctgaggaatggtagctccatgctgaagaggcgctatcggatgtttcagataccttgctcccgatgctggatactgatgacgctaagtgggacgagctctcatcaaaattgaagaaatccatggtagatatgtcgagctgcaacgggtcgatgctgtcggccgagtctatcgagccagaggaaatggcattttgaatagtcgcttctggaataggttcatcttctggcggcgaagcccgccatcgctccattggggtcagggaggacagcgtgctggtgaccatgggagaccccgagcgagtacgggatgtggaagcaagacccgcagcctggatcttttgcttttgacggcggcgggcgtttgcaaaccaggttgatatgcgtttctgggagaaccccgtctcgtgggccatctgatttttttgttcgtccgttggataaggatattcttgattttgatagaaccactcgcggagaactctagctccttttctgagaaactgtttgggttctttttgttgatggccattgtccatagtagcagcgggaaatggatttccatcttccgggacaccgtggagatgaccaaagaccggagagaaagtttcaaatcccgacggttggcgtttctctccctttgctaagctgcattctcgaaaaagggctacacaacttgagcaggagttcttgggattgggattggcaggtgcagtgcgaattatcagacactgtagccgatgcctgcgacaatgggcacatgatacaggaggacgatatgctccatccagccactgcgagacatttgtaagacttcgttgcgaggatgggccaacagattctcttgctaaagagggagcggaatcatagacaatttcagaagccttcaattcctcatgatcttgatgtccaggttgtgcattgacggtttgtgtgaggtgtgactcataattcgtccactgcgaccattccagatcactggtatctgagggaaacgggaattggtagtcagtatttgtatcaaaagaactctctttgccccattgggtgggctcaatttcacccagcaagccctccagctctatgtctgatagaggctgcgacaacggctgccatggtgaagggttgatcgatggcgaccgtgaagtcatgccatatatcgatgaacagattcgccggcgcagtgccccttcttatatatctctaatcccaagcccacaagtagtttggctagaacccgtcgcgtttatgcttcgcagtgatctgccaatatgatggggtcgtcaacaagtccacgctaatccagattaggccaggaacgtttctctccgcactagtcctaaaacggcaggtgcgcacttgcctagatgagttgtgcatattactaagctttccgcccccgaggcccgtggacgaatctcgggaacaaccattggatccgccctgcatctcggggtctgtgacctcgtgtttcctgcgcctactcagacttctctagagttgccttgccgactacttcctatctatctccataaatccttcgaggtttcagattacgcacgaggttgtgattgtccaaagttcctggagtcccatccttctaccatcatcgtacttggttgtacctaaccgagcacaattgagcaaatcccgaagagatggcatgtttggatggaacaatcccaatctcatggtctagcctccaaagatgtgtttgttcctaggcggctccaataaaattctatggaaatcgactcggaacgttgcttatcagaattaagcttatctttatgttattgcaagaccaaacacttaaagcttggttcacatagaatccgtattaggcaggacgctaagtgaactctatgctgtgggggataaataaacgaattggaacgggcggagaggttgatatggcattgatgacagtacaacggagccagagataggatattagacccggggtagatatggaggaatatgtacataacgcgactccacagtgggccgcaccggagttggccttatcgtccgtagttcggacgggggcgttttttagtcgccactcggtgagagcgccaatttatttagcgaaaactcggcatgcacccgattcccggtgaagatctagtctcgggaaaaaaaaggctatctgatataaaattaaagccacaattcgcagcctcttcagacgtacatcgatcggtgtatacaaccttctccagcgttccccagcaaataataaaccttaataacatgactggccgagcgctaacagtttctatgtgtcaacgatcaggcaatttacgctacaatgtagtatcaagtgggactgggggtggaactggggcaaaactagctttcatgagcaatgagctgaatttccataaccaaatagaatgagtcagcaaggcacttccggcaccgacattggccacacgctggtcagatctccggattcggtccgacctgagacaggtcattggtgaattcgtcgcgttgcatcgaattttctgtggaaccttccatttagtcctacggggccgaatttctctcgcgagaaaatggggaaacaataagatggccagaattcccgcctgggtttgtttctttcctcgtgggctttaaacatttcttctccatcttcaagacttgaactacacacaatggaggtcaacacagcaccacccgtctatgagaatgacaagatcgcagaacggaaagatgaattaacatacgaggaggagggccccatcaagactggcgaagtccacgatgcctttggcaacgaggagtacgctgacatcaagtataagaccttgaagtggtggtatgtactatcgttgggaaaagagcctctcgattgaccgtgctaacacgtcttcaggcaatgtggcttgctcatgatctgtgagtcagtctcactgggtgtgttgtcgctgccagcagccatggctaccctgggtctcgtccccggtatcattctgattatcggcctcggacttctcgcaacatacactggctacaatattggcctcttccgtgaacggtatcctcatatccagaacctgggtgatgcgggtgagattttgctaggccgcttcggccgagagctctttggtactggccagttcctcttctgtatcttcgtcatgggcagtcacatccttaccttccgtgtcatgctgaacaccctcaccaaccacggcacctgctccgttgtgttcagtgtcgtcggcatggttatctcaattctcctgtccatgccccgtacgatgaagggtatgacctggatatcgttcctatcattcctcagcatcttgagcgccgtgatgatcactatgatttccgtgggtgtcgagaagcaccccggtcgtgtcatccacgccacagtccccaacgacctgtacactgctttccaggccgtttccaacatcgtcttcgcttactgcgcccacgttgctttcttcggtttgatcgccgaaatggagacgccccaggatttcaagaagtccttgttcatgcttcagggctttgagatctgtctctacctgaccgctgctattgtgatctatttctacattggcacagacgtgcattcccctgccctcacttccgcaggacccctgatgagcaagattgcctacggcattgctatccccaccattgtcggcgccggtgtcgtcaacggccacatcggcttgaagtacatctacttccgcctctgctccaagtccggtctgatgcaccagaacaacaagcgtgccgtcggtctctggatcggtcttggtattgcttgctgggtcgttgcgtggatcatctccgaagccattcctgtcttcagcgacctgaacagtttgatcagtgctctgttcgcttcatggttcagttacggtctgtccggtatttactggcttcacctcaactatggtcaatggttctcctctccccgcaagatcgcccttaccgtcctcaacatcttcattgcctgcattggtttggtgctgtgcgttcttggcctgtatgcttctggtacggctatcaacaagaactccaacagcaacagcttcacctgtgccgacacggatacttagatgaccttcttgcttcttgtttcatagcgctagaccttgttaacgttacacgccctgtatatatactgcatatagattatgctcggagcgcactggctgactctagaatataaataattgattaaaaattctcaactatcttgcttgtcctgattgtagttagattgtagttagattgaatcataagagcaagagaggtgatccttaccataccagaattcggtatatagacctgctacctatagatatggaagtcttccaatggtaactagctctaagcgattgaccttgaatacaggtttcgttatatactcatattttatagcaatgttcacttaatacatggtctgtgaagcctattctattccaattcagcatcgggcgtggctgagtttgcttggatgtaactagaaaagagatgaaagaggttagaagaatagcaaacatggcgtgttagaaagagtctctagatactttgaagtttatgttgaagaagtgactaggagttgacaatgagatgaaagctcttctattgagcaatgtttgctaaagccggtcattctcactctttctaagtctacacctacaactgccaccgtgaccttcaatccccctctacttcttctctccctcacacttatccttcctctcttctttcacatttacctcaagtcaacaatcattccttttagagtgagaggtgacattcatcactcaaaattcaacaggacagtccaccaacaggaggtaatatttatcatcaaagcgtctctcaaaacgaagacgatgatttacctcaactaggtgtaccgagatggattccaaaacacctcagatctcgccggcattagaaaccctaccatttgaaattcgacgtcatattctttctatggttgaaatcgacagtctcaagaccctcgtgcgagcctctcctgtttactttcaccactaccaactagaacgcaagctcttgctgtgttaaagcctggagtcgacattgggtagcgtgactgctgatgcctatgcagtccacaagtctacttccatggaatgttcaaaaggacgggatagcaaaggaattgatgattttctgacatcctaccacacaatgaggtctcaagcctggctttcacctttccacaacattctcatcatggaagaggtcgagacaatggtcaaatttcattgctcgattgttcaacccttgatgcgatgctttgtgagagaagcattgactaatctcaccgagaagacaaacgagtctcagatctcagatcgaagagactccgagtacaacagaagagacaaaactgatgcgcgggttttaccgattccaactctgttgcaacatctatggcctcgaatcggcggaatctatcccctatgttagctggatttctatctcccagcgcattctgggagacttcttgtgcatctttgacccttgggaggcagaagagatatcttgcgtcagttatttctgcgaagaaaagtgcgagcagatcttcgatcagaccaaacagggcctggatgaagagaactccggaatcgatcaacctgacatatccgatattgctagcccatgtgagtaggaacccactagttttgaagctcgcaatttgagctctatgtgcgggtctgaaaataacaattttggctttgaagcaacagccaagttgaccaggaatcgtggcctcgagctgctgcacttggtataccccatcaaagaccaggaccacttggtagttacgaggcagttgcccccacccatgcgcccgagcggcgttctcagtgatctccacagcgtcttcgaacaacacttacaatggcatcgacactgcgttcaccctggggaacgcgaccatcgacaggagcgccgtgagccgctcattttccaatgtgacaggaaacccgatggaagttgcgcgctcccaccgctggcctggacgataatatggggtggaagttacagtaatctctttggggagtacatccccgacgcttcatgtgaatgggcatgggttatgtgggacgcagatcgacttaagcgaatgagtgctttgggggtgattatacaggaatgggagaaggagcatcatgatgaccctaggaaggattacttgtgaccggcactctatgaggcgatgtcgatatcggcacacacgacgatctgcctactctttcttattctcagcctcactcctatcgtctctcctatcatcatcatcaagattccaaaatcaagatgtcgcgaatcagtggaattgcatcttccctttatgtccctttatgcctcaaaatcatcaatgatgggcagacctattacgactttgacgccatccagccccgagggcgagtcggtcatgtatggtgtttggaactctatccttacctggcaattctacttgcccgcatcacagcctccaattcagctctcgtggcttttcggatttcgaagtgcactaatatatttctctggttgtgcaatgcaagtgggaattcggtagttatatatgggacagtccgagagaccaactggaaaaataccttcaaccgattcatggcgattctgagtccagtcctaccatccacggaattgtggccattggagaatgagtcagatctacgagtacgacagtatcttgtgcaaatggcttcatccagctacataactagctctctctgtttgtttgtataatcattcgggcccgaaatccttctttctctcccggttttctgagcctagcatcaatattaatggagccgacgtggccaccatactaagggtagttgaagattagagtctggaaagatccaatcacaatgtgtcattctcaagctacataatcccagaaagcgaaaccccctcggctagttcatctgtcccatcagtatgtaatggtaacattcttgttcaaatacttcgcgtctatcttcaagacaaggttctcagcaagccacccccccgcatcctcccgggagatagtatagccaatagccctacactcaggaccagtcttgggatcctcgatgcccacacggatagtcttgtccgactcgccatcaacaaggtggctcgcacgaatgattgtgaacgattccccgctctgcgcgaaacggtcttccatgactaccttgtctgctccggggacgctgacaaacaggtaatagatgggtatcataacaaaaggaacgtcgcggccgaagcgcgagaatcccgctgtactgcacccaattatgtgtggagttcccgtaatgccggcgcttcgaagctgggcgagggcatttaggatagttgccgcgcctttcttgcatacgtctggatcgtcgacggtcattctgcgtggcttcgcacctatggtagacacaatgacatcgacgatgtggccatcgtcggtttggaggcactgcgatacggcggagatatcgtgtgcattgcccttgatgactttcagatttggtgttgactctgaagggaagatggttgtgagtttcgagggatcacggcacagcgcaatgcatttgtggtccgcagcgagggtgcgtttgagggcagcaaggccaacgccggtgctggcgccaaagaatgcaacggacttggtttttgaggtcatcttatgggctgtggttgtgaaagtagcgagatattggaaggctatcctctgatgttgatagtggaggcgagctggatgttgttcctagtgtcttggaaggggcgatgggcttcataatatacattttggctgacagcagaaagcgaaaaatatccgagccaacgcacaatgcctcgctattttctcgcgacttgcgactcgcaactcgtattacaatgagggggagaacacgaggctaaccaaatgaggcggaaatgccgttctctcgttggttgtcgctcaacctacactactgagtcagacagccaactcttccaggccttaccatttgcctaacgagatcaggataatgaaggttttgcttgatccctgtctgattgatcactcactggaacaagcccatcacggtcccaggatgcccgaggagcctcctgtcacgggggacgcgctcgcttcggcctcggatgccgagaaaaacgcgagtttcgacgcctcaggcagaaacacaacatcgccgaagccgcgcagctgcgttgtatgccgaagtcggaaagtccgctgcgacaagcgagcgccttgttccaattgccgtcgcgcaaatatcgcttgtgtacttccaccaacagaccgtccgccaagatgggctcgccacctcgaccgcctcaacagcgcggtatccaacctaccggccttccaaaaacccgaagaagacgtgatggagaaacttcacaaccttgaaagccttgttcaggagctacggattcagctggaacaggctaaatcagcagctaactctgccgaagggtcatccggggttggttcgcctgaaagctccgcgcatgatcgacagtcgaacccatcttccattaatactgccagcgtgcaaaataaattcgggagactggtgcttcgggattcaaaccgaagccgctatgttagcagtggcttctggtctcgggtcaatgacgaggtatgccgccttggtttgttatggagtgaatggcgagttaactcctactcagcttgatggcctcagggctgatgttcgtgatcttccattaggggaacccgatacctcggacgatgaggcatcgcaggagatggtcccttctacacaagaacttgaacggacccctggagagcgtcacggattcttgtttgggcataatttgagtcctttttcttctaacctaagtgaccttcatccactcccttctcaaattccgttccttctagacgtgttctccgaaaatgtgaacattatctttcaaatagttcatcttcccaccgtcaagagcatggttcgcgattggcgcggccgtgaaatgaaggatctcacatcggccaatgaagcattgatgttcgctatttactacgctgctattacatcgatggaagaagaagatgtaagtcaaattagattttgaactttcggacggatccaagcatgcgggctcacgtctcgggacatttaggtattacttaatttcggagccaccaaagccgagctcaatctcaaatatcgccaaggcctcgaacatgctcttgccagagctgattttctgaatgcacctaagctagtcctagtgcaggcatttgtaatctttctgtatcttgctcgccgacatgacagtccgaggtttgtgtggatgatgacaggactagcgatccgaatgggccaagctctgggactacatcgtgatggaacacatttcgattatcttagcccatttgagattgagatgcggcgaagagtctggtggaacctttgcattttggatgtgagagcatccgacgatcaaggaacagattacacaatcacaggagcgagcttcgatactataatacctctgaatctcaatgacatcgacctcgaccccgaatcaaagcagacacttcaagctcacgatgccttgactgatatgtcagttgcacgtgtctccttcggcatgtgcgaggtcacgcggcagatgatgggtcatggtttcaaagaagcagcaccaagtctagaagagcaaagtcgcttattgcaaaaaatagaccaaggtcttcaacgggactttctccaatactcaaccgaatcagggaacattacatactgggtgatagttacggtcgctcggcttcttatggccaaaatgactctgcttatctacctgcctctgttgttctcctcctcgaatgaagacttctcggaggagctgagaacaaaactgctggtttccagtatcgaggtcgccgagtacaatcatgccctgaacaatgaacaagcatgtagacactggcgctgggctttccaaacctatacccattggtactctattgtctacatgatgcttgaaatctctcggcgcccgtggtcgcctctttctgaacgggcctgggtagcccttcacagtgtctggctaataccgaaccagacacacatggaaagggatttccgcatctggatcccactccgaaagctgatgaccaaggctaggaagcatcgcgatatggaattcgggcgactgagaagcgactctcaagctgtccaacagctgaagcagagctattttattgctccactcccgtcgagcactgggccgtttccatctgattcaaattctgcagatctgttccttgaccaatggctccagctagtggcacaacgggatagaaccaaagatgaagcactcacatcagggctcgctatcactaatacgtcgaatccaccgatgcaaaatacaagcacaacgcagtcaagggtgcgttctgctcccaatttatctcaaacattctcctcggctttcaccgttgagccagagtatctcgttgcagaagaacggcatttcgggtacgaagtatcaagcagtgaatctacaaacttcgactcagtcatggcgtctaatgcaggactcggattcggacccgaaagctctgctacttcatcacataatcacttctcaatggcaacggaagctcaatttgacggtcaacttgccaccccagctgttgtaccttggctgtggtctgagaaggacatgtcagctgatttaaatagcatctccgaagatcaagccgggagtaacatgggcatggatgaggaggtggattggtacaattgggccgcgtctgcgaaggatatggagtgtgatatggtgaattatagtagtggaccacgctagcctccagttatacgcggggctgctggtatccacctcggttgtaccttgattctggcattttccttccttaaataggttattggttctggtaacagattctcgatctgataattcgttctaacgccttccgagaatgtggatcttgatggtggatatttgacggagaaactgaccaatcaaacgagcccagcgaccatcggagcatatatgcgcgtggacgtaatacgaatcaagtatctaaggagtatcaaaagtaaagaaagaacatcaaaagctagagggtttactgtgctcaaaatggtgaggctgaagaaattgatgccaggtaccttttgtatggcccacaccccgcaaacctgagaaaatggattggattcatccaattcccctgaaccccgccaagacccggggcttgggtaacgtggctgagtgtcccgagatcggacctcgaggcctgataggtggccaggtgagaagctcgcttcgagaaaattctagtgccagtcttgcaataaccttggaaagctaaaagcgccacagttggattttactttcatgcacaattactttaaatcttcgagctcctcatgagaactggtcattttagaggaaaattgtagaatctggggttgaacatggggtaaacctaatacataaagccttgactaacagtttccaatagcgttatcactaaggagacaatgctcggggccgccgacttaccatccggggtggttctatattgcacgccgggccgggtgcgccgggccggtacaatctgacgccgggggcgcataccgcctacggaattggctcgcggacgccaaataccccacaaacctggcatcggtcaagatattaggtaatcattccccggtgtcgcgagccaaacccatgaacgcattcttcaatgccatcctcgaagttgcgatctcattggcgatttaccccggagaacaccccggagtaaatttgagcgagttcgggatttggtaatgactcgtctccccacactcactagtatatcaattagtagtactccatactatctggtaatggaatattctgttaacctttagtctctcacgccaagcaaagactctgggccaaccgttctttttgggcctccactagcgattttcggtgttttttctttcgcccaaaagtttttctctcttcacttctccatatcatataccttccaacatgagtgtccccgaagcaccccatcctattcaggactacgaagtgtacaatgactcaaccgacatggagaagaaggcgtacccggtcgaccccccggatgatccctttgggaacgaagaatctggggaagtaaagtatcgtattatgccatggtggtcagtatctcactctgtttactatttttattgcatcaaagagcacatttctgacttttatatacaggcaagctggaacgtgtgagagcccatcattaaccctagtcaacaggaaccccattctaacactgttcatgtagtgatggttgctgaaaacatttcgctgggtattctatctcttccatccgcagtagcaaccctcggaatcatcccgtaagaaaatttctacctccacgatgcagaaagaaggctgacatctcccagagcatttgtcattattatgtttttgtccgccatctcgtggtacactggatacaccatgggccagttcaagcagcgttatccccaggtccacagcatgggcgatgcgggcgagcttcttctaggccctatcggacgcgagattttctttgtcggccagctgctgttcatcatcttcttgatggccagccacattctcacattctcggtgttgttcaacaccatcacgaaccacggtacctgcactattgtatttggagttgtcggcttggtcgtcagctgtgttgcggccctcccgcggacagcagagaaggtcttttggatgtccatcatctctgccatcagtatcctggtagccactatcgtcacgatgatttccatcggtgtgcaggcgccctctgatgtccagaacgatatcgtcgcgaccccgaccttccaggaaggcttcttggcggttaccaacatcgtctttgccttcattgctcacgtgtctttcttcggtatcatgtcggagatgcaggatccccgcgatttccccaaggccctcgctatgctccaggttatcgatactactatgtatgttgtgacggctatggtaatctactgctatgcgggcccgactgtcgagtctccggctctatcgtcggctggacctataatgaagaaagttgcctatggcctggcaatcccaacggtgtgttatatctccttgcagtcgattcgggagtctgttctaatctctgataggtcattgttgccggtgttgttttcggccatgttgcatgcaagtacatctatgttcgaatcttccgcggcgatcgctcccaccacatgcaccagaagactttcttggctacaggtacatgggtcgcgatcggcctgactacctggactgttgcgtgggtcattgcagagtccattccagtgttcaacgagttgttgagtttgattgtatgttctatactcatttattaccgtgcgtctactaagttgttatacagagtgccctattcggaagctggtttagctgtaagtcgacttctgagactaagattgatgcgaaatagattactgactgagaacagacggcctccctgccattttctggttcatgatgaacaagggaaagttgttctcttcaactagaaagatagccctgactattatcaacttggccattcttggaattgcttgtactattgtatgttttgtctctctgtgtgattctgaatttcctgctgacaagaatagtgtggattgggactctatgtctcgggcgtggctatcaacgagagctcgtccaatgccagctggacctgtgccaacaatgccacctagactcagttattaccacggtggatatatgacatgtttctggtgttgaaaatggttgctttatatatttgctctgggaagtaaatatactggtgttaaattttacacatatactttgcatgctacaggtgttgctcaatgtctaaagggcttttatcacttgaaaatacaagatgagttctcaccaaacatagtatcacattcttctcttgtacaaattaatctataagacgtcgtcccctctaaactcccgccgaacactgatgtcatcactggtgcactattactaattgtgctttccaccgtggggaggcttgccactgtgcttcgcctctgacaagcccaggcattccgccatgttgaaaaatatgtcaatcgagctgtaaacacctccaaacagctcctgacacgggccacgggcaaagactggcacatccgtcaaagagtggactccctgtcctgcatcaaggggaagagttccattgaccatgaagccactcacggcatccttgtagttggcaacgtatcccttcttcgtgtcctttgtagcaggagtacggggaccctcgctgtgaacccggtaatcctcgcggtgatcagggaaagtaacaacacccgcttgcagggtgtatcgggggtcccattgggcagggaagtggacgccttcggagtaccgcaaggcattggatccggcgacggtgtattgcgacaagccggagttctcatagtnnnnnnnnnnnnnnnnnnnnattgcgacaagccggagttctcatagtatccgaccgcattgcgcttgctgcggtcgtcctcctgcgcctccatgtactgcgtgtcgacggatccggtcacgtcgaaaccgtggccgtggtcagctgtgacgatgatgagggtgtcttcgagctggccaagcttctcgagtttctcgattgttgcgcgcacggtatcgtcgagctcgagcagctcgcctagggaccggtcatagtccagagtgtgcatctgcttgtcgatgctggcggcctcggccatcaggaaccaaccatccttgcggtgtcgcttgtggagcacgtcgattgccttgagggtcatgtccttgagtccggggagatcatcagcgtcgcggtctgaaccgtcggggtagttgctctggttgtagaggttggactggtagacgttgcgatcgagccaagtagcgagattggatttctggaaaacacccagcagcttctcgttgcttggggcgctgtgcagcgctgtgttgttccaggctacgttgtaacccttctcggcgaacagcttgtagtagtcacgcgtttcctcgctctcgaggaaatcctctgcaccggcaccaaggagcacatcgggaccatcccagtttgtccactcgtacttggtcagaccttcgtagtatgagccgatgacatggtcgtattcgccacggtcgctagtgtgagcagcaagaccggcaggagtagcatctgccaaaaaggcagttgacacaatgccaataccggaaccggggtgctggcgacggaagatctctgcgattgtctcgaatttcgggtcatcgaaagcgtcgctggaggagtccacatagacacccaaagcattgacggtagtcttgtgaccggtgtaaagggccgttgcggagttggccgaatcagtaatgaaagagtccatggagtgtgtcatctggtgacccagcacagggaacttgtccaatgccatctttgtcatgtatttgccgttgatactgcggtgggcaatgagacgtgctgcagtaatcatgttggtggtcatgccgtctccgatgaacataacgacgttcttcgcgcgtctcttggtaggaagatcacgaacaaaccagttggcgactgtcttctgctttccgtagtaggtcagagtagcctcgtattcgccgggctcataaagggcgattctcctgtagattttcgaggtcacattgacaagggaaggcgtgtctgcgtcctgtgcgaatagatctgttccagttagcttaggcgttccccgagagctgaatataggaagtcattaccttcataccatgtgaagttccacttttccaactggggttcatcaatcttgaagtactttgctgcagtgacagcagatttacccttctcctttccattgcccttcttggcgatggtgaaggtgaagttctcgtctggcgatccaacacgagcttcagacccattgacgggggagtgtacttcgagacggatgtcgaagtactgacccgctaggaagtcgaccctgcaaatagtaataagtggctagagcttaggtacaattgagacgttacatactgatcaggtgggaagatacatcccaagtcagggcaaccacccaaccgctggaaggtctgggctgccgcgaacgagacaaaacatgccagcgcggagatagaagaggcgcgcatcttgataagccgattgtgatgaaacgtagatattcacatttggagagaaaacacctccgttaaatacaagaactccgcagctgattgcaagcaaaccctcctgccaagaatctcctgccaagacaatctatagtggtatagacacaaatctccgaagtatcccagtcccttgataaagtactattgctacatcgtacatttctttatggggacgaataggagacaagcacgatctgcacgtgcgtaatcctggagtttacctgggaagcttgaacctccttgccaagttgagggaacggaatgccaagccaatccagccaaccccagtcgtccgccaagcttcgagggcttggcagactctcgcacgtgggatggatgggagatgcggtggaatcacgttctctttactgaaggccgttcatacgcctgggtcatttcctatgattggatatatatcaaatcgagaaaaggtaatcctaagcgctcggctgaaatgtccaatgtgagatgaaaatcaatagacaacgtagaaaatgagaatagatagcgcaacatggtgtcgtatagtgcgtctacaatctcatgctatcgtatcattggccctgtaacttcagctagttctcatctccgattcgcaccacccttttttcatatagagggtgggggacctcggctctcgcttgggataaacaaactgcgcccttggatcccagcgaggtcgtacgatccttatctagaagctgtaaagctatccgagtgccaaaagagcctgagtaccacatattctagcacgtgcccctatcatcatcgtcgggctcgttgatacacctgaggattttactgcattggcccggactccggctcatcgattagaccaaagctctgctcaccagattacctaagaatacacgtgataatcatgtcacatgatgggccggtgaacttagcttccaattattgattgcggagcgaagcgaagcaattaaatcataacctcgtgtgcagctccagaatcataagaagctatgcggtggaaagtcatcggctaactttggcagaataacccaaccggcagagatcgactaggcctaatctggctagacgataatttctttcaataccatttcaaaaccttacctttaccgccttctcaatcagttcccacggttcataataaccctcatttctgccagtttttcaagaatcaagatgtcaactctcaaatctttttgggggaaattgatgaaaatgagataaaacggtgaaaactaacaatttttcttcgaggctagcccgcctatagatagtaccttacgcaggataaaagctctacagagggtgcctggcctgtgatgacccggaatgtaactaagtgacttactttactaattctaaaccagccctaagcaattaaatcactaacttatggtgtagactaagaaagaatgggtcgtttatcctgatgagaagtggtgccgttatcctagatgtctacatcaagtgagtttagtttgaaacgattgacgaccacttgaagtagtttggaactaattctcctttactctagactaccttcaccaataccaatgggattaagcaccatattgtacggaaacaaatgactagtaatggcgatatcatgacgtggagtgctggtggttctccctctctggcttcgctccaggtggcaaatggtaagtaaactcgaagattagatctgatctagcttctgactagtttagacgatttccacgagctgatacggattcagtataaacaaattcatacagtttaagaggaacaccgtcctgccctacctttaaagcgcaatggcgaagtaagtattgccctgaactagtcctgacctagttcctgatttctgaatagtttaatggaactgaaatgcgtcgtcagctccatcagatgggtcatactggtgcctgcgtgtcgtgcgaagctgaatttgccaccataggtaagttccccctaccgctaacccttttcaaactagtccatatctaatttataactaatttagcttgctgtactcacgctcgtcgggatcagtgtgattactttgagtatttctctgatgaggggatattgcggaagataagttcaaagaactgatcctgacccagttttgactaccttgacctcggggctttatatcttctggtgtatgacctcccaattagatcgaactgcttgcagtcagcaaaaatggccccaaggcgtgattccataatattagcagggaagccctagagtctataaatagacacaacatatcttgctttttttatggtattaaccttagggctttgaaatcaaaatggacaatgaatcgactacttttatcggatgctcaagatgactgctagtattggacaaagaaacacctctttcaacgcttattgtactaaccaagctgtgctatgaacaattatacgatgtaagaatattttgataatatagagttttcattatcagtctttgaatgaatatactgaaatccgacttgaaacatggaacatacatcctcatagtttaaatttagccctttgattttcacgattctctcaagttcatctctttctctattgtctgattgatcccagttcaaagaaagccggtccaaagcacagaatctataagttctcataatttccaccaagtttgccttttgattaacgacacttgacaccgacaaagtactaatgccccttcaaggtcttggactgatatcgccttttttacagcaatcttcataccagtccaaggttggaatttctaacctctctcaaatgctatctccaactctcaaatacggcagtcgacaagcccttggccggctactacagcaatggatcgaaagcccagaatctgactcgtcggggggaatatgtccgattctgccttctaaactaaaattcaaagacctcaagaagtgcaagaaacttgaaatagatatacagatgcatccttatcttccaattcagattgaatacgaatttgaacaacatggaataatgggaccaaccggcggggcgtgggacatggtctccatagaagaacctgacgctccacgagaccctgaatacccgcacgttcatacctggaaaggacaaattgcgcctggggtactaatgattgaggaaataaagaaaatacccggtttctttatgtcggaagtctgccaggccatttaccagaactacttcccgattgatagcttgaagtatatctatatgatcgacgtttgcaataaagacactcgttcgtttgctataaatgagctctataccgaagccaatggctatacttgggaaaaagatacgattaattgcatacctggaaccccggaattcgaggcgctgctagggacaaaacttggacgaactgtggcacatttggttctgggggccttcaaacgtggaactcgtcggatttcacaaattaaggtctttgataactttgaagctttgcagttggagttttccattgttccgactgatgccccggctcaaagctcttcgactcgtagtacaaggtcaaaaacgcgccgcgagcaaagcatcgaatcgaggaagcgcaaaagagactcgagtgaagagcctgcgaagaagagactgaagcgcgaaaagtgaagaggcgatttttcttaggagttggatgtttactattgggccataggttcttgttcgtctttgttcatcaggtcactttatatatctagaggttttatgctcttgtaacgctgtgtaactattctaaatatgattcaactgttcttcatatggcaatgtataatgagcttacatgttagttcttcttttagggtcatctgattaccttgggcagccccttcccctttcagatcccaacttcccagtttcaaacaacaactcatcaatttaccaagtctaggacagccacggagtattcttttattctccttctaattcccatttctttgctgatcacagggtagctgaatggtccaatatcggctctttgttccgccgagtcggcggatttaccgcactatactcaaagctccttccatcgagacttaacagaatctttcttttttgaagactaggctcttgaattatagtatcttatgagcccaatatcttccgaccgaatcaaagcaatccatgcatcttcgcccctcatggcttccttgtcgttggggcttgggattgcagtgaccaaatcctgtaagtagccaatgagagatccctgaagttgacaaacataatgtctgacgcacttaacttagttggcattgctatatggactgccatcattactccattccgtggccaaaaagggggcggtacagcctacaagcatattgccctgtcttttcgcgcaccctctttcgaaatgcatccgtggagcagcttcagtgagttgaaatgttatcctaggatagaaacatatcttcaaagtccctggtctgacaaagaaacaattcnnnnnnnnnnnnnnnnnnnnnnnnnnnnnnnnnnnnnnnnnnnnnnnnnnnnnnnnnnnnnnnnnnnnnnnnnnnnnnnnnnnnnnnnnnnnnnnnnnnnnnnnnnnnnnnnnnnnnnnnnnnnnnnnnnnnaaaagttacgaagcccacatgagacaactaaatgcctcccccaacatactcgctcttcccgaaggtacaatggcatttcagcttggtaacgttgcttctgagaagttgattatctactttcccggtagcggctactgcctccccgcactaccgagtcacttcagctatctcgaagctctcttcgcggacataagacaatacggaaaaagcatcggtgtactactcattgtctatgagcttgcccccgacaattgcaacaggccgttatcgtgctacagtgcgccatccagacactgggaaaacgaccgtcaaacattattcttcagggtgactctgcgggcgctcatcttctgcgagcgctcatcttgcacgtgggctactatcacatctcactcacccacatcctcaagagatcgtgccgagattttcggttgatgagcctctcggaggagcgatgttgttgtccccttgggttgacttcagaactgatcatccgagctccagtgaaaacgcggataaagacgtcattacggctgagactttgaatagctgggcacggatatctctgggccagacggcggaagatgagtacaactgccctgccaaagcccccgcaggctggtggacagatcttcctgtttcaaaaatctttgttggcgccggaggagacgaagtcctgttggatccgattaggcagatggccgagaagatgaaggtgaggcggcttttacaatctttgcattctatctaacaacttgtcattccaggccgaactccccgacgtgagcataagcattgtgcctggagaattccacgttgagccaatcacgggcttcgctttgaagataccccctggattgcagttcaaggcgatggcgtcatggctgtaccagacctttctttcctgtgaattgcgaaagggaatgaagatgaagacagtaagatgcattgcctgcatctcacgattgtaggtgagtaggcggtcagaccgcgccaactcgatcagggttgggggctttgttcgacgtgtcgacacccgattttcccagaccttgactgcctaacttgtgtgagatatttcaattcatattcttaccactggtgttttacgtgaatagtcagaccctttcccttcagatgcactcgatccacgatccacatgcgcggcccgagagacccggggatcagcctcggaagaagatccgaaaagggacccgcagttgctggcaatgtacaagaaccccttgatacggatgatttattcctaacggttgttttctgcgataggcaaacatcgcaaagttcgttgtatttttgtgtctgatagcgaacagagctgcaaagaatgtctcgcccggggacttccatgtcgcagccaggaattgccggagcctgagaatccccgcgaatcggaccgcacatatctgaacgagcggatggctcgggtggaaaacctgttggagaagcttctgatacgagtcgacggtgggaacagtcaacagggggacttgaaatcacctttagatttagccgaaaccagcctcgaatcgagcccctcgaccgtgacaccagccccggacagtgctccagtcttgtctctttttgacaacgaagcggttcgtgcgataactcgcatcggtcttcaattcccggtagctcccgcttactagtgaatagataggtttcaaacgaaccgacaccgttgagtccgattttacgccatatggcacaattaatcgggactgggggagactgcgccgcgatctgacagcattgataccatctcaaaagacattgaaaatcatatcggaggctagcagtagctggtggcttatgcgcgtgcagttattcggagactacgatgaatcattgctttcgtcctcggagcaacagctttcaaatagccacccagctatggttgctaaggccatcttgtggattgcactgtgtctccaacaactcccttcggggtttgatttgtcctctcttgatctgccctgcctcccatgggtcctggttgaagaatgcatcacccgtgtttccacgctcgtttgctccgatgactctattgttagttgtatcgacgggcttgagtgcttagtcctacaggggttgatctttagcaatgacggaaagctacgaagtgcgtggctttcttatcgtcgggctgcaaacatcgcccagctcatcgggttccaccgtgctgaaccagctcccaatcagagtgtcgagtttcaacaccgggctacgttcatctggagacacatccttatcgttgacaggcatttttccctgatccttggggtacacggcgctatatccaatacggcaatagatctatatcaatccaacccaagagactcccatgatttacccgttcacaatgaatctgttctgaacccgcttgctcggatagcaggctcaatcattgagcgcaatcagaccttcaccgaagtcactccggccatgctgcagatgacacaaagcatcgatatgaaacttcaagcgttcgatccccctcctttggtgtcacccgacaatcttccgccaggcaagtgtaccgagcggtcttcttgttttctcgggcttcactatcgattatggtactaccagctcatggcttggttacacctgcctcttttactagcgtccggtactgacaactcctatgagtataatcgccagacctgtctccacgcctgccgcagcatcatcgcttgttatgtcaatatccgacgcaccactgaaaacggatttgactcgaagattcttgatttccaagccttcactacggcgatgacaattattgtcaatgccctcgggccatttggcccacaggacttaaccaaaggagattacttcgctctcgaccgggttgtggctgttctagaacaactatcgaatactgttcctccggacaagatcgcaactcgagcagtacacgttctgaaaatcatcaaggcaatagggatgggaaccgaacccccgcaactggacgaatcagaaggacaccaatacgagaatggacggcctactcgcatcaagctcgatattccctatttcggcacaatatacctcgaacgtcgttccatgagcgctcaatcatctagacatattgctattgctgttaaaccgccaccaactttgcccaataccgcgcctgggcaatactacccatcatcttcatggatggacacgatgccggaccccggttatccaaatggaaatgttgtggaaacaacccaatgggcggattctaacttgagctttgatccgcctaccgagttttgggctcttaactctgagttcacgtttcaggctccgtttttggctgattatgatgttaattgggattatttggatatgggattatgacgaacgcgtgtaagtcgagcggattgtgccgaatgcaagtcttgtattctttttcctcaatttggtgttttggcaggccacattttgtgttgttcctatagaaagaagtatccttagaatcattcgacgtgccttggacagtccagtttttattagatatgttggtctgccaggtcactttgattcgcccctcaatagtttatttatagtcaatagtttatctccgtgttggagaaagagcagtccggtgagctaatgtcggtgttcattactaggcgagtaccgttcacaagcgatataaagttcactcacacccgaggaatcatcttcattctactcttgatcggatgtcgggtaggaatcctttagaagatatgagaggaaagttattgagttcaaagaacgggcagttacctggagaccgacatagagaaatgtcattgaggttttgacagcccaaaacgacacccaggtataatagatgaaatgagggcgagctgttgctgatgaatttccacacggaaggagaggacgccgtttggcagccaaggaaataatgctagcctaacttattggaagaagagggaagcaagagtgttacgtatgaagatttgtgtctattcaacctctatgaccataattctaggcgcagtgactgaagccatgaagcctgagagacaaacggcgaaaggatactgtcaatacaaaggggccagtcgtcatcccatcgcaaagcacccacagctaagcaatattcctaatacctaggataccatccggatttttcccagtcaattatcacgaggtgtgaaccttcttggtcatgacttttctcgcggaggatgatatttttcctctgcaaatcaccgtgggtgaatgtcgctgtatggcctttaaaaataaaagggaagcatcttcgaagatattccgctctgtagagtgggcccctgttataggtatattttcgtaacattgcttcgttaaggtcttcttcggagtcgaatggaccattcactaatggatctggcttatatgtccaaaatatctcatctaaaagtcgtctttggtcgaaactgccaaagtactttagggatagaagctgacgcaagtcgtcaaagtaactccaaaggtcttttagtatttcttctttctccagtattgtaagttacggccatgctaaaagaggtgtttgaccgagaatacgctctatgacaataaaatttttgcctgtctctaggtctgaatagagggcgaagacacgtgggacagggatatttattttctcccgaacaaataacatattttctccttccatgagattgacacccagtccaaatttcacaataaaatgcgggcctactccgactatttttcgtcctccatattccatgggtatgccaggggcgttttcgatttcggtaccggtgggtcgcgggtaaggcaagtcagttgcatagaacggaatctcaaatgtcttcatcatcgctcaacatcaggcagtcggtagactgagggggagactgaagggtagggcgacgaatcgacaatgggtctttttggctcaccgctctaattaccgtcttagtaattatggttttaggacggttccatggatcaggtgtacgtagttaactatggctaatgtcatcgaattttcgaagtctattcacgcctatcttcctctagctcgacgcataactttacatcgtccaaaaagttcagggaaagaatgctaggtctacaggtatcataaagaagatgacaagtgactgatttaagaagcatcgggcgctatatgatcaataatagagtctaactcaagtctatgaaggaccgagtcggttatatatgctctggaacagagatcagtaagaaattccgttgaatctccgtggaaaatactcaatggacaaggtacgtacgaaaagcccctagcgatcatgtctgggaatatgtctatgacaactcccccgtctttgtggacctggtccatgcaggcattgatatcctcagtcgcagctgagtctaggaaggttaccttattcgttagtagggatcatgtgactatgagaaaaggagaagggtatttacaatatatttcgaacccatgttattcgagcatgtgtaatttgtatagatatttgagaggctgcttaggatacagctgtcgatgaccagcttagctatatatacctgatgcgccaagaacactgacgtcattgcatggttctaacctgaccgaggaactatatctcaacatccaggtggcaactaccattacgtatcctcctgaaccgggtcaatccgtttcgtggcaccgtgttacccacccttgaaccgtatattcaagcaattgcagcaagtaatatttgaatattgccttgttggtcgttgccagggtcattgcgacccggatacgccaattaggtggtttacatccgctctatgtaaggtggtgtgatattgcaatgtccaatgaataagacatcgcactctaccttgcggctttgaactctcgtgtatatatatctatgcgaaataggggaatgggacgccgggtaatcacaacggaaatcagtagtacttgttgtatacgggaggtaaacaaaggaaaaaaggacccacagaaatttggggtatagcaggtggcaggtggcaggtggccgagagatcttattctgaaagtttcgatccttgggatgacaacagctctgtgaagttacaccaagcccgcttgtaagagggatccttggtggagcactcatgcaaccaccggagagccttttggaccctttccaatgcctcatttctctcactggctcttggttggttctggatgagcaactgtgttgtgagcactacagtgctttgcgtgaggtagtggagagaacaccaaggtgagcaacccaagagccaggagatgttcggttcattgggtaggagatcaagcatttggcctgccgcattgaggcagaccattgccattggcgtgtcaagaccagtggagaagacgtcacaacgaagcgcgggttgtgaaatgacaagtttggtcgaataatattgaaaagccaaactcgtgcgttgacggacaaagggtcggtcgtctctaatttccgcgaaactataagtcccaggaaggcgcgcaaaccagttgtcagccgctctgttgagcgataacatggccatttccgtgtcattccgagattttcgtcccgcttcgggagaatacaagatctcgattgcttctctcatcacagctgccaagtcaatggaataaagaaagtacaatgagacgttagcctgaatctgcaggccaggtgatgcctggtgagacatgaacggtgaagaaggcgagtgggctaaagggtcgttcggttcagtcgagggatcaaaggagagtagagaagccatgaggcggcttctggattgaatgtccaaaataagcctcattacatgctcatcccggaagtcttcctccttgtagggcaccggcaaaggggttgtacagtgttcttgctgcattctgggcatacgtccagtcacgacgcagagcaggatgtccaacaggtataacgcccaccatagccgatatctggtttctttggacacgtgtgtgatgctggggctttcgctacgaaggtggattcccatcgcgaccgccgactggattgcaatcccacattttctccatgacctaacccagaatcagtagctatgtaaagactcgcggtgttcgacctacctgttggcctgcccgatggaaagcaagtaaagtgatattagcccctctacctgtgcctgctgcaggttgggattctccaatcggatactctcgctcgtgtgcaattgccaggcacgtgtaaagtacaccgcgtggatgttgtgatcttgagattggtctccggaaagctcgaaatgtcttgcagcgatcgcgaaaaccatattcaacaacgccatccacttgtttccaggatgtgctgtggactttgaatagaatgaccgacactggcttaaaaatatctctttgccaacgacggggaaggaggcgtgggcaacttggaagtacctgtccacaagttcatcggcgaccgcttttgagggatatgcgagagcatctagtttctttatcggcgagattcttgtatcatcgataaagaatgcacaggaagaaattgaaagaggggttgattcctcgaactgaccatccggattggaacttgtcggaccgatcaagcacctaagcctgtataaccatgccgatgccgaatgttctcctgtaaagccaatcgcttgcagggaaatgtctctattaaagtcctccaaggtgtgatccacgtagggaagcgttcgggccgacgaatctgactcatctggtactttggcaagggtcggcgatgacagggaaaggctagctatctgtaggttgttagataaaatcaagaaagattttggctgaccggaatatagactcgctttttcgagagcttggtcgatgactttgcccagctcagtgtcgaataatttgggataaagctcgcgaacgagagattcgtagtgttggagttggctcgttatcactgtaagttgtctaagtcctaggggtgaatattttgggcgatcacatctaggaggatcacagacctagcatttctctctcgtttcccgtcgacatagacacagagaacgttggtctcctgacatcggaggcaagaggggcgatgaccagaacacttgttcttctgtttgcgacagttgtggcatgcctgactaactcgaccagtattgcctacaagaggaaggtcgagtctaggaatggccactttagcgttcatcggctgctccccggcggctcgagggttgttccagggacgatatgcccccaagacgatcggctcccgtggtgtcacggcctctccactctcgagctcatttgtgtagttgaaagggtccttatcatttggggggactgttggaaggttttcagatcgcgaagatcgacgagatggccttccactcattgcaacttggcccgctgttcatggtcagcgcagagtcctaagcgagaatagaaaatctgcgacgaatccgagacgcacaaaccagcttgagggaagcaccgggagcaaaaacctcctttcgcagtgaaatatctgccggtgggattgatggccggagtatagctagcaacaagacttgttttgacaaaaggcatgacacctgtgattggcaggcccacgatcccggttggatattggtcggcgccattggtcggtgtaccgagatgccaacggcccactggtggctggattcaggacaggcatgatagatgattgggatcatctggtgttgaccacatatttcaggggttggctacaggtcaaggttgctgaactgcaaggtgctttttataagaagatgaatacgatcaatgagttcaccatgaggcatcttcaataaatgccagtcggtaatcatgacctcccgaggtcgagccccataggcaaaccttggaacgatgtatccaattacttccgaccaattagagacctcgatgtggactatctgccagggtgtcaaatagagatagacattgatctctatatatacagggacgaccctgagaataagcctccttttttaacattgcgggatactcccggcggctttatatgtctagccgtcccttttccttgaatcgaatattctgtcactggaaatggacctatcgttactccccatatgccaatggcttgctctacaataatatacaaccaaagtttcggctatccataactatctttaacttaatcacattggttgtctcgaaactaggactagcgcggatagctcttagcttgatcgactcttagctttgtagctatcagcaccctcatcacacaccctccatgtgtccgcacacttcattcgccagcctaattcctgcgtagtccgacatgcaggtataagcaggataaccgaatgggctgtaagttgtatggcggtataaaaatgggacatgcaagttattcatggtcggtgacatcatatgctatattacacaattcttctatagtaaagaacaatctagcagagaaagtcaattgaaggtcagattaaatgcattgactttgtattgagaatagacagctttgccaattcacctgaaaggtgtcaacgccaagaccgggattccgctgagatgggatacacagcaatctcctggccagccctatgcttacatagattggcctaaaatgtggggaagtcatagcgatctttgcgtgtgcaccttggcaatctagatgatacaggatcaatgataggttgaatggttgtgatatcgtcatagcctcatttccctgtcgatgacgtagctctggggaaagcttccttcatccgtcgatcttgaaatcccggacaattcttaagttctcttcgctcaacaattttattctcgggggaatcctgagaaggtgtactcgtcttccttctaccgcattgtacagtcaagccaaatcaaccctacaaatagccaaaccctgaacttcgattcgtttcctttttttccgccgctctccaagatggctacaggtcatcagcatgatgctcccaagagccgccgggtcggggagcattggagtggtgccaatcctattccaacaataagtcactttatgaaacatgtcgaagacgaaaaaaaggaacgcaatctcaggatagacgaagaacaccgggctaataaagaaaggattgcacatgaaaaagcgcaaggaacctatggagagcaatcagagcacgcagatcaaaaggatcaagccgagggaggtgctgtcgctcataagccacgcgaagtctcccaggccaggattcgtaccgtgacagacccaactacgggcaaggagatcggcgtggaagacctagatgagacatgcatggatactgtaaataatccaatggtatgtgggatcatatcgaaggaatcttgaacggagtctaatttattcgcagttgacggttccgaatgcgaatcttgggaagcccacggtgagttgtctgtgaatgtcagttcatgggacatatcactaatatgcatatcaggacatccaaacaagtgccgaccaagatcttgcagagtataaaaagatacaggacattaccgcacctcccgatcctatcgccgagggtacaacctccgatgttcccattcgaggagaaaagacgaacgttctgttccaccccacgcctactgtcacgtatcagcctatgtttgacgcactgcagaagcgtaccactggcatttgcattgggatacctgttgccataatcatactagggcggatgtgcgggggatccctttggggtcttgttcccttagccgcatgcattacgagtggaatatggttatggatgaaggaagtcattcgcagcggtcgcgcaatggagtgggagagtgagcatcttcgcggtcagatggtaggttctctattgtatcaccttgttgatggatagagatactgacagttcaaaaggctactgccaatctccttcctgaatctgtggagtggttgaacagtttcctcggtgtcgtgtgggggctcgttaacccggaaatgctgacacctgtggccgacacaatcgaagatatcatgcaagtctctgcacccaaggttgtagagaatgttcgcatcgcagcaattgaccagggcagcaacccactccggattctaagcatgcgggctctccccgatgatcatgtggaaggtttgaaggaaaacatccgcgaggaaaacaaaaagaataaggacccacaggaagctgctgctgccgaagaaggagggagttactacaacatggaagcctcctttgcctatcacgcaagcccaactggtcacagtgcgtcatcgaaagcacgcaacatgcacatgcaacttgtattctatctgggcattcgaggcctatttggtgtgccatttcccgtattcgtggagctgattgaacttgtcgggactgtccgcttgcgcttccaaatgatgcccgaaccaccattcatgaaagatgtgacgttcactttagttggaattccccacgttcgagcaggctgcatgccaatgttccgaacgggtgtgaatgttctgaacttaccgttgatctccaactttgtcaactccgccattagtaccgcttgtggcatgtttgcagcccccaagtccatgaccatggatctcggcatgatgttgacaggagatgacatccacaaggatactttggcactgggtgtgatgtggattcggattcaccgcgctgttggcttgagtaaacaggatgctcgcggtagcgagggtggcggcagcgacccatacatcaacctgtccttctcaaagtatggcaagcccatgtattgcacacgtgtgattacggatgacctcaatccgatttgggaagagactgccgcccttcttgtgacgccggaattgatcaaggccaatgaaaacctgagcatcgagctctgggactctgaccgcaacaccgcggatgatattgtcggcaaggtcgagctacctatccgggagatgcttcagcatcccagtcagatgtatccccaggtctcgaagctccagggtatggatcagggcagtgaaatgcccggtgagctgcattgggaagttggctacttcgggaaaccaaagcttcgccctgagctgcgtactgatggccagaagaaagaccttcctgaaaacctcagaggcgatccgactttcgaagacgaaaagggggctatcaaaaacgaagaggaggatgccattatgcatacaccacccgatccaatctggcctagcggtattgtgcacattgttgtgcaccagattgtcaaccttcagcttgccaatatcaagggcagtgatgggaaccgcaagggcaaagagtatgagccagcgaagccatatggtgagaacacagaggaggaaggtgaagatctcccaacgagttactgcatggttttgttgaacgaccaactggtacgtatttgtagacatactagtccactccaaattccagatactaacagtatatcagatctatcgcactcgtgcgaaggctgtgagctccaagcccatcttcaacgcaggaactgagcgatttgtccgcgactggcgctcagctgctgtgaccatcaccgtccgtgaccaacgctatcgcgagcatgaccctatccttggcgtggttcctctgaagctatctgatatccttcaaaccagctcacaagtaacccgctggtatcctctcgacggtggtattgggtttggacgtatccgcctttctcttttgttccgccatgtggagaccaagctgccaccttgcatgcttggctgggatgtcggcacctttgaatttgctggacagaacatcatcgcgaaggactttggtcgacactctaagatcaagctgcgcaccgggggcagcgttggcaagatcacccggcacaagtgccacatggaaggcaatgacgcgatattcgatatctccgatgacgctttccgcgactcaattcgcatgcctgtaaagtaccgataccgctccccgatagtattcgagttccacaacccgggcaagcgaggcgcagccgcatacggtattctgtggctccaacatattgtcgacaacgaggaaacagacattgacattcccatctggacaacaaagatgggcgctcgcttgacacagaattacgtcacggaggagaactggaaggccaagcaggtacctggactcgaagacttgacagaggtgggacgtctgcaattccgatgcaagttctcaccgggcattgacgaatcacacgagctcttcgtgattgacaacgactcccgtgagaccttcgagacgtgggaagcgtgcgtgtcccagggtgtccgtaccagcacggtggaggtcgaagttcctcctgaagtgcaggaattgcacgagcagtctctgatcgaaggacgggacatcttgaagcaagcctcgccctctgagcgtcagcggtggattgaccacgacggccaagactggagtggagcgttcggtcaagacccgcgggcgtacactgattccctcggacgcaaaatcgctgagcctggccgggaccaaccgccccatgacccgtacacccctccgcctctcaaggatccatcttctcatcgatccagttctcaatatggagagcaccacaacgaggacacctcggagtcaaatgacgagctcgagcccttgtcgagaggaccctcgaccatcagtggcagtggacctgggacgtctgcgtcacacagcaatatgagtactcgccagatcaacaaggcgaataaacacagcgagcagcgacagcagcgtggtatgatgcagtggcggcctgcgcgcaatgctgcttttgctaaagatgaggccaagtatgcgttccggaagatgaagaagaagatcggtgctggtggtctcactggtcgcgagccagatgtcgagacggagacttgacgatgtatgatgttttatgtttcggcgttttgtatgtcctttgcatttgcatataaaatgtgaatatagatttattatttactgtttaacacccacaagttaactattgaacgcttatgactaccattcactaccatgtagatgaacctaagaatggcggtgatgccttataaaagtttaattccagatttggtcaagaattgaattcgtgaactctgctttctgtcctcgttgttttattttgtgccttatgagattgggaaaagtatacatcgaaaggatataatccatagaagatagaatgatagaaaaccatagccagtgaagaagaaaagaggcgcagatgcgccaaaagaaaccggacaaacccaaacagcgcctctatacaacatgattcgtgagaaattatatgcatcgccattatcatgcaggggaaataaaaggagacatcagacaaaaaaagacatcaggcataaaaccatgaacgtcacataattaacaatcgggcgcaaagtcggtggatactcggagagactctgggccggaggtaaccttagccgcgttcaataatgagacattctcggggccattgatctcggccctatcgacaggcccgagagtccatttccattccctccgacgcttggcccggccctgcctgggcgtgcgcggcgtcgaggagccatccgcctcgaagccatcaagcaaagcgacggctcgcacctggcgctccgcacgcatggtgcggcgctttttccgctccgtcttggagagcgaagacccgcgcacgccttcatcggcactggtctcatcgccggaggcactccccgataaggacgggctgttatcggagtcctctttttcgccttcgaggtgcgggaagggggcggggcctgtctcgggtggggttttggttctggcgagtgcctcggttcccactgcctcgtctgactcggtcacgagatccaggtgttgcgcggtgtagcattctgtccggatctcctcctccagtgggtaccggtagctgacttgtttctttgctgggaagaagacgcgacgtgagccgccgccgttgggcccatttccgcttgctgagatggagccnnnnnnnnnnnnnnnnnnnnnnnnnnnnnnnnnnnnnnnnnnnnnnnnnnnnnnnnnnnnnnnnnnnnnnnnnnnnnnnnnnnnnnnnnnnnnnnnnnnnnnnnnnnnnnnnngggcggagggttctagtggggagttgcgtaaaatgctgcgcacgccgatggggagttgatatgggcggtggttgaagatattattgttcgggtgtaggatgtagggagaggccggtttgttgtagcgcgtggatttggagggggagggtgcggaagatggggatgcaacttcgtaggcattcttgaaggtgtttcgaatagtgggggatgaagttggtgctgttgcgaaggaaaatgataggccggtcgttgaagtgccgaatgtgcgagggagcgcggtggtttggagggtgagttttggtcgggaggtcattgtgctcgtcgcttcagacagacacgacatggtaaaagtagagaagaatcaaatgtgtgtcatctcagcccaagaagaaagaaaaaaagaagaggaaagatgtttagcggggttgaactaagaatagaggaggttggcgcttgggatgtgatgaaagatgcatgtcacttgcacattccacgacttaaaaagatttaagattaacgtcaaagtgctttattcagagtatttaaaccatctccatggagaattaccccatatatactccgaagtactccgttcagcgcaaagcagagatttccatagcaattccagactccagtggatgcgtaactatcgacgccaccatccacactaatttcggtttttctattttggtagtatagcagatgttgttgtttatgtcaagagtatcttatagagtattttaaggtatttcctgaataaaaacaggatcaggagcaggatcagagagaaaacgcattcgtctataaaaagaacagggcccgtgggtctccgatctacctatacgggtatatgcctggtggcaaagacctaaatatggtgggtttaggtggaaatgccattttgcatgtcttatcattctttgtctgcctctactttgcctatacagactacattatacctaatataaagtggcactgttgtatactacacgtgacgctggctgcaagcgtcgaagaggtattcgagatatgattggtgggaaatcgatccaactgcaccggattgactagttctatcttgttgctgggggcagggtaacatcagctccacccaatggcgtcgatgacttctacctggcattttccactttcgtgcgatgccggaggaaagcgcaaggactggtcgactaggatgaggtagcacgggatctcattgagcatagatatctaaaatgaagaaaagcagcttagaaccaataaaatggagtagaataatataactgactagtaactacttcgtgcatgaactaccaggcaccaaggccaataaagataagccaccgacgccacaccagccacaaataggccccaatcgtgaagttgcctgcggttcctgttttcagcgttcgatcgttgccaggcacccgcaaatcaaggtcccatggacacgtcgacatcagctcagagttcatggctgcactagtgcggaacgacgatcgcatcatcctccacttggtagctctctccactcttactgccactggccacgctttgactaacccatatccaggattatgactgtttctatgcctcggtcttcgaggtggaacaacctgcattgagatctcttcctttggcagttcagcaaaagcacattgtggtaacctgcaactacgaagcccgacgccggggtctgcacaagttgcagctcatcaaagatgccaagcgcatctgtcccgatgtggtaatagttctcggtgaagacttgaccaagttccgaaatgcttccaaggagctttatttgctggttcgctcctttgtctggggcggccgtgtcgaaaagctaggctttgacgagctttttctcgatgttacggaaatgattgactacaacgctggcgtgttaaatcgaaatgatttaacgaattcgtatttccatcttgatcggaatgacccgaccgttggtttttcctacgatgccactcgcttccagggatcgacctttcccgcaacggaggcagccgctcaaaacgattcgtcttcgttggaaatgaggttgctcgttgcctctcatttacagggtcatatacggagtaagatagagcatcaaataggcttcacggctacgggcggaatctcaacctccaaattgctagccaagttggtcggtaatgtccacaagcccaatggccaaacgactcttctgccgccatatacggcgacggaaaataatactagcaacgtgttccagttcctggatgatcacgagattcggaagattcccggaattggttctcgcatcgccgagaaactgaaatcccatatcatagggaaagagagcgtcggcgagaagatcacagtcaaggatgtccgccagttctctggtatgagcccatctttgctggagagaatcctcggcgggccaggctctgtgaaagggatcgggatgcgcatgtggaacattctccacggagtagatagttccgaggtgctcgagggtcgcgatgtgcctacgcagatcagcatcgaggattcttacgggcggttagatacgcttgagagtgtccgacgagagctcgtagtgttgtcccggagtctgatccgccgcgtaagaaccgatttgcttgatatgagtgatgacactgctcctcaagggagatggcgtgctcatcctcgcacgctacggttatcaacccgaccaagacttccggcagacttaggtaccaggcgtgcatacagttccaatcgcatctctcgctcagcacccctgccaccctttatcttcaatttggatgagaatatcgatgcattagccgtacggctggtccgggaaagtgtgttccctatgtttcgcaagttacatcccgaaaaggctggctggaatctcagtttgttgaacgttgcggttaccaatatggtggagactgcgggggaccagaagcgaagcagtggccgtgatattgggaagatgtttcaacagcaggagacagtactcaaggattggactgtgcaggaacccgagccctcgtttgctaatccgcagttacccgattcccctgagatagagtcacagtcggacgatggctgggatgacgatgaaccctggagtgtggattgccctatatgtggggtgtcaatcccacactttgcccagttggcacatcagatatatcatggggatcatgaatcacagccctctattattcggcagccttaaatgccaattaatgccaagtgtcagaaattcttcaataggcttccaagcgtcttggcttaagccacttacgcgttataccagtacatactatgagaaagactattacatagttcccttggtttccttagttacttactgaagagtctcgacgttaacgtgttgggatatatatcgatgatggtatactccgcacacttcaatatcacccatggatgctataacctgccaagcaagcaagagacaatatgattggatgaaataaaaataactctctctctccacagaaccacaggaaccagttatcaatgcgtgcaatatctggaagattaaaatggcacttcgaaattgtttcagtccactttgccaagccaactggatcgaggattcctaagcccttggcagtgagccctgtacagccccggcattatctgatccctctgcctttcctttcttcactttctggtttcttgaacttctagtccttcgttgattttggtttctctcttgaaacattccttttgaacccctaaacccctggtggacccttaaaatttcccttgccactcagggtctcggaaactctattgaaaagaccggggaaggaccctgaattctggatcttgcgatgaggttttctaccattctgcccttgatcggtgcattgtcatcgctctttcaacaaacacaaggtaaatccccacttgcagcccagaccgtcgttgcccaggcctccgttgctcagcccgttgctcagcccgttgcctagctccgttgcctagccgctgacaatccccagcacgatcacaggcctcaaacgccattcgccgagtgacgcccgtcgacaatgccatcattcgtactccttcacatcaaatagatcacctgtcacattttgatatcacgttcgccctacaccaagacggcaagcgcataaagctagaactcgagcccaataatgatatcttggccgacgacgcttatgtgcaatacgtccgtaacgacggcacaataacacattctgagccgatcaagcgagacgagcacaaggttttccgcgggcgcgccttggtaggatccggaaaggggagatggacgcccgtaggctgggcaagaatcaccgtccaaagggatggcctcgagcctttatttgaaggcgcttttagtgtcaacgacgacaagcaccacattgagctgcaatcgacctacctcgacaaaaagcgcccgatggatgccgacgtcgaacccagagatgggccatcgatgatcgtctaccgtgactccgacatgtttcgctatacgcactccgagctcaagcggtcgctgcccgtatctgaaggctgcggcgctaataaccttggatacaatgctgatctgtccaatacgattttcggggatatggacagccaatggggtgtggtttcgttgaactcgatgttcggattaagcaagcgacagtccgatgttggtggtgtctcgggaaacactggcggtgtgaatctgaaatcgaccatcggtgattccagtggatgtcccaaaacgaagaaagtggccctgatcggagttgctacggattgtgaattcaccgaatcctttatggctacaaactccacacctgaacaagcggctagggactgggttatcaacgtggtgaacacggcttcaaatctctatgaagaatctttcaatgtgtccattggtttgcgcaaccttacaatcgccgagacaggctgctctagctcgggctccgctgctacgccatggaacgtggattgcaacggcggaaatgtcacctggcgcctgaatgaattctccaagtggcgcgcaactcattcagatgacaatgcctactggactctgatgactaactgcccaacgggctccgaggttggggtttcatggatgggtcgtctatgctcgtccgaactggttacctctggagcgaactccgtggccggtgccaacgtcgtagtgcgcaattccggttcttcctggcaggtgtttgcccacgaaaccggtcacacctttggagcagtgcacgattgcgacgagagcacctgcgcggataacctggaagcctcgtctcaatgctgcccgctgagttcgtcaacctgcaatgccaatgcgcaatacatcatgaacccctatgctgagagcaccatcaccaagttttcggaatgtaccatcggtaacatctgctctgccattggcaaaaatagcatcaagtcctcttgtctatccgacaaccgcggcgtcgtgaccatcagcggcagccaatgcggcaacggcatcgtcgaaggcgacgaggagtgtgactgcggcgacgaagaaagctgcagcgacaactcctgctgtgaccccaagacctgcaaatttaaaggcagcgccgtgtgcgatgactccaacgacagctgctgcgatcaatgccagttcgcctccgccgacaccgtctgccgcgccagcaccggagaatgcgacatcgccgagacctgcagcggaacctcgagctcttgtcccgccaacaaatacaaagacgacggtgccagctgcggcgccaaggaccagggactcagctgcgccagcggccaatgcaccagccgcgactaccagtgccgcacagtaacaggcgcggtactgaacaccaacgacacctgggcctgcgataacacaggcagtccctcctgcagtctcgtgtgcggcgcaccctcatcccaacaatcaatgggtgccacaagttgcctcatcatgaaccagaactatctggacggtacaccctgcgactccggcggccgctgcagcgccggccagtgcaagggctcctcggccctgggctggatccggcagcacgagaagctggttatcggcatctgtgtcggtgtcggcacgttcctcctgctcgctatcttcttctgtatctatagtcgttgcaagcgcagtgcacagctgcgtaaggcccgcaaggctatcccccctggcacttatcgccgctataatgggccccagcctactgcccgcccgcctatggaccagtggcatggataccggaatgccggctatcagaatatgcctccccctggttattccgggtatcagaatgtccctccgcctggtgtcccgtatcaaaacggcgggtatcagaatatgcctccccctggtcccccgccacgatacgcatgatcacaccactctgcttctagttatattacagtttatgggttttattgaaccttgtcttgtttgcattcgggcctctgggatttgatctggaggatttgggtatcggcgtcatcgcggatggttgtctaggtggttattatcagtcctttcgcatggataatatcatctgcgatctggggttttgggctttcccttcttgtgggtacttcttgaatttggatgcatttttcgtgaatagattatgtcgaagccctttgggctatgaatgataccgaattttcaccttgcgagagagcatgtagatgtagaggaataaatatccatttgaagtgcgattttgacccagaataaacacagaggcactgactccaaaaacaagcacatgagtaaaacgacaagagaacaggaaaagtacttagatcccaacaccaaggaaaaaacccatgtacaacaaacaaagtcaagtcatgtcaagtctcagtctccgagagcaaccgaacccatctaacaggattcaaccccaaacaagaccttagacatccaactcattgccaacaaatcccaacaaaagcctcccgagtaacaccaccaacgccctcaagatcaaactcctcaatcatagctctaagctcctcctcctcaagcccagtctcccccaactccctcgcaacacgcctcaaatcctcaaggtcaatgaaccccttgccgccctcatcgaacagctcgaacgcgcgcaggatctcgtcgcgcgggtcccgctcgaggatcttcaacgccgtgacggcctggaacgacgagagcggcatgagcagattggacggatgttgcgggttcgagacgggccctttgttggaggcgaggggttgggattgggcgtgttggttgccggcggcgccttgttgttgctggacttggggacggggtacgccgtacgttgttagcagggagatgagctcttgtttgccgagtgtgaagcctagagcgcggaaggcgacgcggagctcgtggtagtcgaggtggcgatcgcggtcgaggtcgaagagggtgaacttgaggggtttgggttagctgggggttttggatggggtttggttgttgtggtttggtttcttttcttttcactcttggagggaggtgagagggaggagggaggggttgcaggatattgcagtaatttaggagaacagtagtgtcatagatgggtggattgggtatcccttacagcttcgttgatctcttccctctgctcttccgtgagtctgttcagcggattcgcgtcctgcgctgggccatgggatacggcgtttgtggcgggcgcgggcgcggactgttgcatctgcttttggccatctggaaattcgccttggttggtatttcccagaccgcgatgccgtgagaatgaggaggcgctgaagggcatcgcgttcgtgttgacggagcgttctgggagtttcgtgccggcgtaggagcgcgacgcgaagggttggccagaggccatggtggatggcgtgttcagatttaattagatggctggatcaacagttcttcagcattgatttgagtgaggggctcgcagcccatgagaatgcgtggagagatgaggtgtttggcggtgggaggattctggagacgcgccagacgcgggcggaatgacaacgcgctgttttgcttctgttacagatgtagtggtcaatgaaaatattattgtttcttggaaattctgggttcaatttattattgctagaaggatgagcgagtgagcgaacttctagacacagcacaacctggtgctaatcacaatatcccaagctgccaacccataaaaactctttaaccaccacctaacgtggttcctcaaacttcctcaaacgagtgctgtatgttcctcccaaggacaacttgttaagaaaaacaatagtggtgagcgaatgttgctgttgccggaggtttcaacaattgtacagagatttttggaaattgccataaagtggcattgtatcgggtggcattgtatcaacaaaggcggcacccattggatcgaatccattgtcgtattcactgttgaggatgtccatcagaccattcggatccaggcttccaacttgatctggataaattacgctatcaaaggaattctgttcctgggcaatcaccgtgtcgtgcgaagtcgctgataactgcaagagcccgtcgtgctgctcatcaggattcgcaaagcgaggtcgagggaaatgatcagctaggaaggcttgcatttcgcaggctggcggcgaaaagggaccgtcaggccggcccaaaacagacgacatttcctcgaggtctcccagccagaaggccatatccaggcttggagacgacgggagactgggaacttcgtcctcaagaatcgttctgatggaggatttcccagtagccccgtgtctgggggacacattgcgcaggatatcttcgagtttttcccgaacaccactcagataaaggcgaaaggaaccgaatattctcgcgacgattgggctgtattgaagatcttgcaagccgcacgtaactcggtagtataatgctgcagcgacccaagcgggctcgatctcattttctttccctggtcggtttttcttgttgctgttctgcttgtcctttccgcacagagccacgtacaaaccagggcaaaagtcctgagacatctctgcgagcttccgaaacgagagaatcaaaagataaaacgagacgagtcgcccggtggtaacatcaaaccaggacgaacggattcgagcttgcaccaagccttgaatggccataaacagatttgccattctgagcgcagtccagacgagcgggttgtgtttgtattgatcttcaaatttgaccagatccacgaggggaagggcactgataagcccagtaagaaaatcatcgacagggcagtctgttgtactagatagtgcgatactggacctcgtgactgtccaatgccatgcagtgcagtttccgccatatgtttcgcggatattaacaaccgcgttgaatgcattcatgcgtttgaaaacctcgtcacccatgcgttgcaaagtatctttcgcctctggggacgggaagctaaagatcgtaagagagccccccgcaggtggcccaagcagacatagatctccccaacttcgaaagcagattcgattacccttagaagagcatggaggacatggtgtagttgttccacactttttcttggcccggtagcacgccatacatgagccgccagctttcctgagtgcggcggtatcttctctctgttgcagaagttcggcccggttacgcggaatcttttcgcggatcttatcagacttctcagggttcgctggatcccacgggacgaagccatcgggatatgcttcctcgagatgaggagatagcggacgtcctagcgcagataatggttgtgttctaccgacaccatgttcactccgagcacgctcatgttcagtcgagacgcgtggcgaggtatcattggcattggaaggccatgttgagggtcgaggattcgagcttgtaggagatacggagctttgtacttggtcttgaatcgtgggaggagtcattattgaatcaaaacaatctgggccgccaggcatatccagcccctgaggttggtcttcaatcatgggaggcgtcattattgaatcgaaagaaactggaccaccaagcacatctggccccgggggttggctgctagacatctggagttgaatgtttaccggactattgtcgactttgttgggcattttgagtatgtctggatctatgggctgggtctcatatgccatggccgtcgacgacagttgccatgtctgtgacattgtatgctcgatattgggatcgggaaagtaaagtgtggctgatgcgagtggagacatggcagactgaaaggtcggtatcagtatcaataatccacgagatgtgcaagcttagaatgaaaaccacagggacataggaggacgcggtgggagatggatcgaactcacaggatagatggaatccggtgtacgtggtgtacacggcgcatatttacgcccgccatttggatgtggagacaatggagacggctgatgccgtgtagcggcttgagccatcacggtttcaagggtgaacgataggaaaggtaatgatggacaccctgaaaagtcctcgagcaaagagtgagagcgaaaggacgggcttagggcagagcctaacagcaaactgatgcttgtaccaacaagttgtcaatcctttgcgaagggagagaatgagtgacgtgaagtaaagatggaacttgagatgcacttgggggcttcaaaaatactcaaaacggactagtaccgttaggaaggccaaacctttacccgaaccttagcagaaccttgaacatcatagcgagacacaagggcatcacttgaggtgaagcaggcacgactaggcccatgaggccgattccaaatccggtatagcccatcgctaggtataaggtttacatggtttccagggtttaggggcggaaggagtatgagtactgccatgtgaataggcctagatgtgatgtatgggaagaaagatgtgagcaaacaatggagacaatcaatctctttgatatgaggtactgtccaaatcactgtctctccgcgtacctaaatccaagtcctctaggaaggtacgaccgaggagttgctcgggcaggtaatcctgttgaaccttgccgtcgacatagttcggattgtacttatactccgcaccatagcctagctccttcatcagcttcgttggcgcattccttaaatgaacaggaatgggcaagcccgcgattcctggctcgttcaaggcggcaaagacgttattcaagccacggtacgcgcgagtactctttttcgatagcgccatcgccacagtagcgtgtgccagattgattcgggcctctggaagtccgattttttcaacagccgaatgtgtggatatagcaagtgatagcatagtgttgtccgccaggccaatgtcttcggaagcgacaacaatcagtcgtcgagaaatatacagggggtcttcaccggactgaatcatgcgagcaaggtagtagagggctgcatctgggttgctccctcgaatggacttgtgaaaagcggatatcgtatcataatgctgatctcccgcacggtcatacaccagcgtcttggtcaaagatcgtttcaggtcctctttatccattccaggtctttttgacagatccatggcaagctccaacaaattcagcgaagtgcgagcatctccatcggaaaatttggcgagatactgaaccagctcttcgtccaccagttcggagggcgaataattcgggccttcaactcggagagcacggtgaaggattgaagtgatatcctcgtcagtgagcttcgcaagagtaaatgttcggcaacgtgagagcagcgcattttgaaccttgaacgatgggttttccgttgtggcaccgatcagtgtgacctggccgctctctactgggcccaagaacacatcctgttgtgactttgaaaaccggtggatctcgtcgcagaagataattgtttttctcccagtgagtcccagctcactacgagcttcggcaaatatcttcttgcactctgctacgccgctgctggtactgtttatttccacgaatctgctgcccaccagcgacgagatgactcgagcgattgttgttttccctgttcccgcgctaccccatagtatcatactcggtactcggtcctgttcgatgagtccgcgtaggatgccgttcggtccgacaagttcttggccgcagacctcatccagggttttaggtcgcatgcgttccgctagaggtgctgctttgtggaaggcgttgatcctgggacgctttgcctgcggctctttggattcaccatttggttgcttaagcacatctcgctcccgtgtagattctgcttcctcggtaaatgatcgcttgccggtgagagcacgtggggttgttgtgggacgcgacggggacaccttcggaatactcgactgggcagaagctttgcgcgcggacggaggttgaaacatgcttgggactggtcccttctgagaggatgccggctctcctggagaagacgacggttcttcgatgaagctctggcagcctgagtcgatgtggttattgatcttcaattgggagacagattgatcgcatattgggcaggaaaccatgatgaccggagaatgatatggtcattcactagattccaaggttactcaaagacttcaaggtgagataaacgtcgaggcgataacatccacccgcgggtgcgacgcgttcaacgcgttaattactaagtaagaggccttggtgcctgaaaatggggcaaatgacagatctacctaactgtatgaaaacatgacatgtagaatatgtagatactacatacatctactcaacaagtacatgcaagtactgtataatctccgaatgctccgaatataaaatcaagtcccgagggccgtcagagccgaatgcggagcacgccatggtggggaaatccgacatctctatctattgtcctctctcctcttattcccttcaatatcgctcatgatttcccgctcctttcggcacatccttgctcaatcacagaattgcaggtctagaacccttctctctgccctttcgacattaccccgccctggttacagcacaagagcgatgtcggctacagcttcgcgacccgatccatttctccccgcccagcgggtggcaggacagcgccaggatgtttggtatgccgtttcggaaaagaagttgggaaagacatactaaactgagatccaaggtcaatcgtcaacgaagccgccgcagcttcgccagttcagccgattgtgaacatgggccagggattcttgtgagtcacaccatttcgaggacccccaattaccccaagggatgggaattgacgggaaatatttgtgcgcagtggctataaccctcccaagttcgctcttgacgctgcgaaggctgcgctagaccgagtggaatgcaatcaatattctccgacgaaggtagagaacgccaacgaatctgcgcatggttacacaggtgctcatacattatagggtcgcccccgcctcagacaggctattgcggatgcttactcgcccttctttggcaagaatctgaaccccgagaccgaggtcacgatcacaaccggcgcaaatgaaggtgagagatcggcatagtttatctataaatgcatacttggcactgacaagcgacgaaataaaggcatgctcagtgccttcatgggcttcatcgaggatggtgatgaagtcattatcttcgagcccttttttgatcagtaaggagctccaacaccgcgagaggattgagcggatactaatttactcggaatagatatattagcaacattgagatgcccggcggtaccatccgctatgttcccctccacccgcccaaggatggtgccaccaagacctctcctgcatcggagtggactatcgactttgaggagctcgaaagggccatgaaccccaagacaaagatgattgtaagcatgcgataccaagattctcatgaatatccaagctaattatagcaggtcctgaactctccgtaagcagacctgatttacagagacgaataaggtctcaactaactttgtattcatagacacaaccccgtcggcaaggtcttctcgcgcgaggagcttgagcgcattggtgaactgtgtgtgaagtacaaccttatcatcttgtctgatgaagtctacgaccgcctcttctacgttccctacactagaatcgctaccctgtccccagagctgtttgagcgcactttgacagtgtgctccgccggaaaggctttctacgccactggttggcgtgttgggtaccttatcggccccgagcacctgatcaagtacgtgtccggtgcgcacacccgtatctgttacagcagtgtgtctcctctgcaggaagctgctgctgttgcttttgagcaggcagagaaagagggcttctgggacgagagccgaacagacatgaagggcaaaattgagcggttctgcgaggtctttgatgagcttggtatcccggtatgtgattattcacccctatgtgccaagtctactctcccatatattgattttgctgacatcaatctctccagtactctgatcccgagggtggatactttgtgcttgccaacctggcctctgtaaagctcccggccgactatccgttcccgccgcatgttgctagccggcctcgtgatttcaagctctgctggttcctcatccatgaggttggcgtggctgctatccctcccactgaattctacacggatgccaacgccctcattgctgaggattatctccgctttgcggtgtgcaagaacgatgatgttcttgagactgccaaggagcgcttgaggggactgaagaagtatatcacccagtaaacaaagacctataggcctttcatatgtgagaagtgacgagatatgcatagaagtgttatgatgccaatagaaaatcggatataaaattgcaaaatatgtgcacaaaagccaattctttcccacagggcaggagtggtctgtctaattgagtcttttcctacttggttaattgtaaaatcaacattcggccaatgatgccaagttcattttcgatcacgtagcagccatcgtcgttggtaacatccaaactcagctatatatatatatctttccttaatgatcaatctactagtacatccatatttactcatgtacagctaatcctacgtaacttacggcacctgagaacaaagaaccaggcacagtagggcaaaggcacaagcacacgacggtctttgtttcaatctagaaacaacgcagggggcgatcaactccccctctatccccacgccactaccaagagcgtaatacaaaaatgggcatcctgaacctggggggcatccaccgactgaactgataatatctctctccaaaccagctaccccaggtccaggaccccggtataaacaattagggctagagaggggacggctccctaccctgaccccggcatctccagctccatggggcccgctcccaccccgtcccaaccgataccacggtggaatgtccgccggtcctcggacaggacccccgggaatcctccgccacgcgtgcgagccaccacgtcgctcaccgatggatgggtggctcggtgcgccctcagaatccaatacttggattcgagggattcgcacactttccggaagcccaaacccatgtcgtggttaccgagcaacgttgggcgacgctcgctcgcgcagatcagattcccgcagtggcgtcggtcggcaccgatccactccgtctcacaagcatgccgcaaaccaagacggctctgatcgatggcgccacccatctcgagtcccatctggtaacgcagcatgctgtccatgtccttgtcactggcccacatattgtgagcccgcatccagtcccgtacaagccggtaaagaaagtccactagggctggatgttcaatcgccgctggaagagaaaaagagttagcatatgatctgaaagttaggcaatggtgagggctgtatgatatcaaaatgcaaggaaacagagagtggcgtgaagctgaaggtgactcagagtgatataaaacttaccgaagagacaaattgcaaggcaccggcggaaccggtccttctcttcggcgtcctcgaaccgcacaatatgtgcgattcgaggtgaacatcgcagctgcagatgactggctggatcgtcctcaaccttcaccaggtcgtcccactccgcgaacacgaagtagtcacctcggtcgcgggcagaactgaaccacagcgcctgacgatggcgctcaggtttgtcccactggtgaaggttgggaagcatcggtggacccacgagaaggtcgtgagagatcgaactggccaagcattgttccaggaccgggagctgcgtacaaactacccagtgtctcttggcatcctcccacaggtggtccttgccgcagtagcggaccaaggaaaacggtccgcacttagggcaaacaacggagaccccaacccccagacaacagagggcttcgcagaatggctcatggcaagtaacgccgagcgtgcgcaagtctaacagtaatccagggggtggggccccggtgttgccgaactgcttgactgtgggagtcagttcattatcctcagacaactcgggtggagacggagaatgaccttccattccattggtctgagaagaagcaggagagatggggagctcgacgtccgcatcgcgagcttgctgacgcttcatcaattcccgaagcttccgtttaccttgcttcttctttttgtagacaatcctcttgccgggtcggctagactcagctgaagtttggtcatatggctggatggtgccatctgaactgggatcatctatcccaaactcagccgagtccgtggtagacaaggcagacgaggcacggggggtcaatggagggtcggtcgtttgggacgaggatgtcatttcctggcccctgtagagccctatggttctcggttagcttgtcttcaagtaaaaacatgtataaaaagtgattgcatacctagactggccacactaaaagactcacttcgatgcaagactggctcctgcgcctcgtggtcgccatggtactcttcagggtctatataatagtcaacaggtgtatcaacatcgatataaatggtaaagagcttaccagaaaaccataccttgtccctgttgttcgagacagggcaccgaagcccagcctcacctccctgtggagtcaagaatagctcatctgaagtcgctgctggctcgttctcttccgctttcaccgactcttcgccatcatcctcatctattctccacaaggcgctcgtaggtgtgcagaaagatgacattgtggataaggtgaggtaagtacgaggggagaggtgggttcgagctgtctcgaatgatggagacaatggggcagtcaagtcattgggcgtagtagggaacgcgggatcgcttattgtttgtgtttgttggccagcaactgccgcaagttgctgcttaatcgggacttcctgtagagcgatgccatgcactcccggaagtaggtcgccacgctggtcgctgccgtgctggtcgctaccacgttgctctgtaatacggtctgtgatgcggcctacattcttctttcctacatccctctttcctgtgttggagctagacaaaccaggcgtgcactttccctttccctttcccttacacttgcccttgtacctcttgttgctcttttgagtatcaatcgtgagtgcagagaccttcttggtcaactctttctgggtcgcctcatgctgggctgactcttgttcagtcaactcatactggttcaactcatggctcaacttatgctgggtcgcttcttcctgggttgcctcttcataaggggcctgtttctgggtcgacttttgacttcccattgtctctatcgtatgttctcgccctagcaatgactgttctggatgtgacataactgacgcatctggcttttcttcctcagagttctcttcttcgactgtggaatgctcggggaccctctttcgggatttctttgatgccttattccctttgatcttcttctgaatggagaaacgggaagtttcatcgacaagcaacttgtcaaacagtttgttgtctatgtcttttgtccttgacatcagccattgaatgcgcagccaaatttggaccggatatgccatccatttgccgtaagtgttctgtgatttgttagttaaacccgaagaatatcggtgaaggttttatactgacagggtctttcttagagatcttttgataaaacttgtcacgcccatcaacggtgacgatcatctgctctacaggtcttctgatcctaccactcacgaacttgaacttcatggtgggcaatttctctttcgctttcatccagcttacttggcagctggatgtctcccgtggagttgtccatttgatatggtaactatgtctttccatgttctttgactctcgaagagccggtgcaggaccagtctcgatattgctcatggcaatccttttggggcactcgaatagtgcctcgatcgagcccataatccccatcatgccgtctgggtaattgatggggatcctgaagtcaacgcggatgatctcggagttttcaataccggcctcaaggtcgcacttgaggttaccattggggttattctctatggcaaatgtcggggtaggggtcctccagttgtgaatcttcagtctcaactgcccattccccaaagtgatcccggcctgtctatccatccaattctctgacatgggctcactttgggaaatgggcatgtcgaggtgttcaaaaggctctctttagcctcgagtggttctcgaggttgttaaggaaggtacctcgctgcaggatacgtcagtcaaatgcaaggtgggtaatccgtctttgcaagatcggtcttcgagatcgtgaggagatgtgatgacgcctccaatatagattacttaccaagatgtgtccttgggatactggaaagctgtaagtctgatgtcacaggaaatattgtggaagctatcctgaatcatcagccaaggtccttgggcgttggtgaagctccaacgcgtgaaactgcgcgagaaattactttgtgagttttcaaagcgttgatagcatgcactatgaggtgaaatgagcttttgttctctgatacaatggtgttgatccctcaaagagatggggagggatatgcacgaaccaaagctattgagtttgcggggtgggaagggttgaagggaagaatctcgggaagggaacaggatggagagaaagaaagacaccaaaaaaggataggctctgaaatttgacaaagcaaaaaatggtccaccttcgagcttcgacaacaatcaacaatggatacaaataagctgtgcacgtgctactgccactgagccttcgaccggtaattgacactgaccaggcgattgggacagaaatgaggacacacacatgtaactcatcccacacagttcaaggcatttgagcataagttcgaagctcttcgatggtgtcttcaaaaggctccgattgctacttatgctgtgggttcagagcctcaaattgaatctgctccagaacagaaaattatgtcgatttcctacccaaaagaatcaatacgcaatacgaagtattgtattgagcaaacatcccgataccacctatgagacttccttgtgatgccagcgttatgttccttccgcaccattcaaactatcagcgatagatagcctacgggagcaacttctggtcgaaactcagctacactaaaacgaggtcaaagaactgacatggaggctcggaggaggcttcacgacacgaaacaagcatgatgcccttcagttggtcttgctgactatgggtctccaacaagagcagcttctgctcaacacctgccttacaccagaaacaaaaaaaaaccgacatggagggttcaagacgccaagcagccatgtcctcgacctgagcttttgctcgacacccaactaaaacaaaaacgatgtcgaaaaactgacatgaaggctcggaggaagattcggggagcaaaacaagcatttccttgaactacttttatcatctcttagctataggtttagggggatagtttcatatctgaggcgaatggtgcttattgtcaatcttccttacgtagaagtcacggaaacacacctgaagcatactccttgagaagagattgaaaaatataccacggaaggctagtagagtaatcaaagattattgttgtattatacataaacaaaacccaagaggtcaaatgggagctcaccttgttgcgtttgcaagtcgttagggtgcgagtctgtcacgtgtggtcacgtttcttaccgactcagtgaataataacacgtgacgcttctcttcagcgaccacaagtcaaataagcatcgaggacctatttcacacactgtaccttttggtggactggctaaataacccattattacgatggaacatattgcaatatgattacttatcgttcgattaccaaaagttgtatacatggaatttatgctctgcacttgagtgggcgagtctatgcatcgattcacaccaagtcaccgagttgagcggcaacagccatagcagaaacaaacccccatagaaatgccaacaacatacgtctcatctacctacatgacacaggataaaaatatccgtacggggtacagacatgatgttagatcaaccagccctcgctgtccggctattggctctcagtcgtgggcggctaagcgcccatggaggctatatttggctgcttgtccactccggcgctttcgacactcacagtagccagtgagatgctttgatacttcatgaaacaaaccgttgcacagaccccttgtcttcaggctttatttttatattttctttgtttcgagatggttatggttcactctgattggggctgtctcgactatacggggttgccaaggtccatgaagctgcttctttatgagcaacattgggctaatgtgatgtctgctgccgcccgggatgctgaccatttccaggtgacgttcgtcgcctgctatatttgaagattcattgtcccttgttttattctggttctattgttctcagtccacccggtctattcatctattgatgccccctttcattcaacgtctataagaaatcatatataccatgtccttccactagctcgactttttcctctgctctctttatcatcctttgagaaatctccattttgatgcaggctttgcatatttccttgatccaactacacctccaaacattcctggtcctcgctggacgatatcacgcctgaaacatttgacaaatataaaaaaagaatccttacaatggtattcactcgaaccggtcggtcggtctttccactgctcccgccttatggagctcacgattcaagcacggggcggataattcccctacatccagatggcctcactccctatctcggtctgcaagctcggctttcacaagtatggatcaatcgatggacaatacttctactgcttgttctcttccgagtgttgattgcagttggcgacttgcagtccaacatggcatccgccaagcgtgaggcgctctctgcatgcacgtcagtggagtctatgggtagcgcgatggcgtcaatgccatactatctatccaagggtaccaacgagcttgtggcttcctcggttgatgaggctgtttccgccctgaagtccgtgttgttgttgactatcacgggcgtcggagagattctatggttcgtcatcaatatgatgtactctacctacgcctgtctcattacgatggccgtccgtggcacggtaggagccggcattgaattgatcaaggaagctactgagtggatcaacaaaaccctcacgacaatcagtggtgacattgagagtaccgtcgacaaatacaaggacgaactcaactcatttctcgagacaatcaataaagttgccagcgtattctcggacgatcctagtccaatcgacctcaacagctcaatcactacgctggagaatctgtctcttccgtcgtcagtcaaccggacggtcgaaaaattagacagccttgtccttcccaacttcaaagagatccagaattacaccaagactctcttcgaaacgccctttcaagaagtcaaaaatttggtaaatgaaactttgggcacttacagttttgatcggtccgctctcccgatccctgccaaaaaacagttgaccttctgcaacgacaacaaaggaataaatgatttcttcaacggagtcactgcgctggcactaaaggcacgccaaatattcattattgttctcgtcattgctgccatattggtgtgcgttccgatcgcgtggcaagaaatccgccgatggcgctcaatgaaagaacgctcccagttggttcgcagggaagcccacgatccaatggacgttgtctatattgtctcacggccatataccgcctctgcaggcatcaaggcagcaagtcacttcagcaacagccggcggcagatcctcgtgcgatgggccattgcctatgcaacatccatgcctgctcttttcgtactggctcttgcattggcagcactattttcttgtctgtgccaatacctgctcctgcattcggtgaagaaaatcgttcccgcactgagtgccgaggtaggagaattcgcagacaaagtcgtggacgcactggaaagcgcctcaacagattgggctaccgatgcaaacaaggccatcgttaatcttgacaccgacctcaaccacaacgtcttcggttgggtgaacagcagcacgcaagccataaacgggactctcaacttcttcatctacaacacatccagcgttctaaacgagaccttcaaaggcacccttctgcaagagcccgtctacgagctatacgagtgcctcatcggcctcaaagcagaggccctccaaaagggtctaaactgggtagccgagcacgcacacatcacccttcccactctcccgaatgatacattctctgccggtgccgcctccagcataaacgacacctccaatccctccgatagcttcctcgccgatgcaggcgatcaaaccgctaacaaaatcaccgaggtcgtcactagcgtgatcaacaaactggaagcaggcctgcgaatcgaagccatcatcgccaccatcattctcttgctttgggtgttcatcgccttgattggtataactcgcgctatgatgcttttctggacgcgcgacaaacaccgcggcgagggaggcaagggtcatatcctagattctgtgcctagaggcggaccaccaccccatgatgcgaatgggtttgctgaagttccactcacggctattccgaggaatatgtctgcagatgggcatgttgctccccagtatacggcggcggcaccccccgtgcccgtgcggagtgagccgtcgtcatatggtaatgagaaggttggttttgcaggggaaagggcgttgcagttggactcgggtcctgatctgaggggaagtagctatgttgaatatgatgtgaagcgatgatgggaaatatattcccgtcttcttccatcttttttttttttgatcttcgctattctcgagaggactatgctctttgtcctccccctctctctttgtgtcatctctggcatttcattggacttgccttggtcatttgtttccatatgtggggtgttttctgtcataataattctcagtagaatatttgaaatcaagaatgccacttgatttcaaaaatatgcaagtcgtgttgaacatcatcttaaatcatatctcttctcacatctcatacaaaacaccttacgagatcggaattcataaacaaagatagaaaaaatatcaatgtactcgtctgtctggatatgctaaacaaaaacccgagaaaggcataatctcatacaaatcgttacaaatgcacaaccactatatggcaacaaagaaactcttttccccctccttaggatgcactctcacgcgctcgatgatcggatccgcacaactaacccgaatccgctcgggggtggcaggggactccaaagagagcacgtcagtgacgttccactgcttacgcgccgccttcaaagcgtcacgaatagcaaagaagaccgcactacccataaacaagggcggctcgccgacaccccgcgagcgttgaatcgtgcgcaagttctcccactccacatccttaagcaaactgacattgaagacctgcgggatatcacggaagccggggatcttgtagtttcccgggcctctggtgaatatctggcccgaggctcggtgccagagactctcttcggtggtgaagagaccttgtccttggacataggcgccttcgatctggccgtagtccactgaggggttgatgctgcgacctacgtccatctttatgtcggagcgtagaggcgtccagtcaccggtcagtgtgtcgatttggacttcggatgccgtgactccttgcgtgaagtagaagaacatctggccgctgttctcgccccatacgtagccgatatccggggtgcggtagtagccttgtgcggagaggttgacacggtcgaagtaggctgcgtgggctagttctttcatggtggcgttgggcatcttctcgcggaagggacgtaggcgtttgtttaattcttcacaggcattgaaaatcgcgtagccgttgagatcggagcttgccgaggcggccgttgaggaggcattggccactgtgttggtcgctgtctccgaaatgaagacattcgactgcggcacttgcagtgcttcggcggcaatcatggtcatctttgtgtgaaggccttgtcccatttcaacaccaccgtgtgctacgaggacactgccgtcgtggtagatgtgaaccaaagctcctgcttggttcaagaagagagctgtgaaagaaataccgaacttggttggcacaatcgccattccgcgtttggaccacttgtgctgtgcgttgtattcctcgacagccttccgacgctccttgtaagagctctcctctagcacttgcttgtacatcaaaggcacgtgccaatctttgaggggctggttgaaatgcgtcatctcacctgccttgtacatattgatggcccgaatctcttcggccggaatatccagacgatctgcaatctccgatatataacactcggcaaagaacaagccttgtggaccgccgaaaccacggaaagctgtgtttgatactgtattggttttgcagacccagccgcgcacattgacattcggtattttataaacgttatcaatgtgtgataagcttcgctccacgacagcaccggatagatcttgcgtatgaccgccattggcgtatacatctgcatcaagagcaaggagttttccttctttcgtcacaccaaccttccaatggcagaggaacgggtgccgctgaccagaagtcaaaatatcttcatcacggttgagcatacatcgcacgggccgtcttgttttcgcagcgccaatggcacaaataccagccagctggatagatcgagactccttgcctccaaagccaccaccaagtcgcttcacgcgcgatacaactttgttcgcagatactcctgtcacctgagcgacataggcttgtctgtacacgcttagcttaaattctgttataagacagagtcaaatatatcgctactcacgtttcgttgggattctgggtaccactccaaatctccatttcaccatcctccggctttggaatcgccacacatgcttgggtttccaggtagaagtgctcctggccacccattcgcgagactccagtaaagacgtggtcagcttttctgaacgcttcctcggtatcaccatttttgatcgagcgatagtggtcaaagaaagacttcgcctcaatggcctcctccatcgtaaggatactcgggaggtcttcatattcgaccttgacagccctcataccttcctcggcgattttggcactggtcgctagaatggcaccaatcggttgaccagcagtaaaaacttcatcgacggcaaagaaaagctcatcggacttgggttgtccccaccaatttgctttgggattcggaagatccgtgtggttaatgtagtctgcaacacctggaatgtccaatgcagcggatgggtcaacgctaaggattttggcatgaggcttggtggacagaaccatgcacgcgaataactcattctgttgcacaggaatgtcatctgtgtattgagcctctccggtggactgcttcaacgccgcaacatgcggagtcgctcgtccaagaatcttctgttggtaggcgacagagctttcaagatctttagctcctgtagaaattgctctttcaatctcagcaacaacatctggatctaaatccgaagccttgacatcgagttctgaaagtacgtcgtagtaaaatctgtagaagaatcccagagccaaagacttccgataactagccataccaccaggaactccaaatggcaggttgaaatcctgctccagtgcgctcatgacaccctctagagttgcggggttcgtgaacttcttgccaaccaaaaacgcctcggcattctttgctgagacggtcatagctgccatgccaccaaacacaagattggcgctgaccacatcattggtcttagaaagagtcacgcgtaaggcggagttgacaatggcaatatcatcgtccttccgcttagattgcttgtaggctcgaatgtgctctccctgagccttcgcggctggaatgcgcaagctagcaatgatcgcgttgggagcgagggcagtctttctgtatccttggaagaattcggtcattggaatttcagtctctccttcgagggattgggccacgaggatagtgttagtggctaccaaaaccggattaagatcagagatgggcgatgcagtggccaggttacccgccggggaagcgacgtttcggatctgtcgcccagcgaaatagagcaactgcttcttgattgctttgaaaggttggcctctgatatcgccgtacttttctaccgcttggtcacagatgtgttcgaggtctgttaaagacacatttgcgccgatctccagatagttgtcatgcaaggtatattgtcgcaattcggggatatctcccaggtagacggaggccgcgtatcgcattgccttgaacttaacctcaatctgtgtctccgtgcttccgccaattagtttagcatctgggtggacgctcttgatcagcaacaattgctcgacggtcaccggtcggtaccacttcttcttcttgttgccatatgccaagggtcggtattcgtgtttccgcagggcgacagggaagatcaactctgtgtctggactgtacggcttgaattctggcgcagggaacttgtaatcgacagtctcaatctcgccattcttggtggaccctttgcagcagccaccggatccatttttctccatacagcagcccgaaccaccattcgcagaggcttttccgcagttgttggtcgagttgaagctctgggcagcatccagaataggtctgtaacccgtgcagcggcaaaggtttccatcgaaggcttcttcaacatcgtgttccgagggagatgaattgtttcgtagcaaagcataaagagacttgaaattattagtcaacctcggatcccttcaaaaatggaagccagcgaaaggagcataaaggcgtaccatgactattccaggagtacagaaaccacattgacttccattgccgaccgcaatccgctgctggatggcgtggggatctttcacattcccaatcccttcgactgtgataacgtgcttaccatcaatgctaacgagtggagcgatacaggcattcacggaggcatggtagattttcttcgttgtcggattgatatgggagacgacctattgacggtataacgctctagttagcactatgtatatgcataacccgatatagttgactgaaacccaccacagtgcaagcaccacagcctccctcggcacatccgagcttcgtgcctgtcaacccaataccccgcaagtattcgagtagagtcacttccgggtttatcgtgtctagtgcaaccttggtgccgttgagatagaacctaatagtgtcatcccagtcctcagtcaacgcagacaggctgatgggcttctcgactgcgcccgtggactccgtctccaggattcccggcgccatagtggaaatgtggggtaccgataagtagagataagctttcaagggcgacttgagatgcgcatcttttagaacgagttggcttcgacgtggatatattagtgaagtctcgagatgtcagtattgtaggaggaaaggtctagatgaaatcagatctccaaaactcggtaatcaaaggtctttaggtccaaggtttccaaggtcgttatctatgcggggatcgccactgtccgagcagtcggatgaccatcggattgcgcgttggaccaatagtttggctggaattactagttgctaccaacagtatgtacagagcacatatttcacataagctgcatgtagacagctagtcagaaatagaatagacagggccttgggattaaatggttgggaacaggcagcgggagagctttcccatctcttccacctttgaccttttctatcgcgcccatggatgcccagtcttcggtaaagctcttatcatacacagtggatgatttggctaactcacacaacatagatgatctaatttggcgacaaatgtatcgccgtgacgaacgatacgctgctaaacaagattcgtccgaccgtacaccgcttagaactcgcggagccccgttttggacttccagaaagagtcattgtcaagcaacagaaagacgaacgggaagctgagttctgcagtgagatatcttcctatactaagttgcagaagcttcaagggactgtcctcccagttctattttggcgaaggctctttcaataggcgtcaggccttgatcctttcagagattgaaggcattactctgcgcgagctcgcgaaacaagtcgaatcaaatatcgaagaggagactttggagttatctcttgagaatgctttcggggagtcttacaagctcggagctgagcattatgacctgaacctaggtaattttctgttctgtgccaatggacaagtggtggttatcgatcttggagatatcgaatttcatgatagacagcaagcttgggaactcagcctcagtatgggctgtgcgtactatctgatgagcagattcagagatgtgagatatccacgtcgtcctccatcacctgttttgtactcagaaatgcctgttgccttgggttgcacggggcctatgagctgctgtgggagccttaggaaatcgaggtttgaacaatagcctgcaacaatcccatatcatcggctgattctctcaatattcgcgactattccgaatgggtcgcttgacgtggagggctggctggggcagtaggcaaaaagtggcaaggcatgagcactaaaaacttcatacgtactccgtaggtaaggcttgaatatctgtccagttaaatttctatatttgaattacgccaaccaaaaaaaaaaagaagctacaatacatatatgaaagaaatggttcgtagatggtatccccataaatgcgcgctcacggtctcgagccagcaaaaggtttctcttcatcttcccacttctgccgttcaacgacgcttcgagccctgtagaatgcgggattagcaacagcctgtgagacattagatacaaggcaacgacttaccgataggccttaacaaaacgccaaacctctgtgtctgcaaggttccaagcctcgacaacatctttgatattgatgccggtcgtttccttattcttaattatctcgcgggccttttggatgagttcatattctttgccgactccttgctcgcttggcgtgttatcctgcgcactcttggtagactctatgtcgttctcagtggccggatcaatcttacccccacgagggatcttgaagccaaactgccattcaaactcgtccaagagctctgccggaagactctggcctgcctctgcaggaagagattccactgtcatccacaacgaagttccgacagcatcttcgcctgcgacaacctgcttgaagatcactccccggtatgaagagcccaattcgggcccaaggtgttccttggtcacctcagagagccatgcgtcgcgctcggtctcccggcgaacttgtgctgtagtgatctgctctgagttcctctgaaggctgataagagtgtagggatgaggaagggtgccgatggtgaacaagaaggtggtgtttttataggtcgaaggctggctgatacgcatgggttgctttgcagtcccagacccgcatgggcggcattcggggtcattgggtggacaggagtcgggaatgggcgactccgggcactgaataagggcctttgccagcctaagagcaggctccaccagggcagtagtgtgttgagggaacggcttcagcacagccagtccggcggggaaggagctatggaatttattatggaggtgggcgttgatcagttggacaagagccaactgaccactcgcagcgttctcggtcatcttttcgtgcacggcagagtagccagaggtaatggctgcagatttgtagaacgccaaagcggtcggcggttcaaccttgaacgattccggatcaatcagatcaacgaaggactgggttttatcatcgagcttcaggactgcgctttgaacggctgcatcgatctgcgacttttcagccgcgtaaaggccattcttaaggttttcaaatcgggtaatggactctgggatactcccccgccgaagatacgacagcatgaaatcatcataacgcgccatggggaagcagtggaaatccgcgagcaagcccgtgcccatgtgcccccacgcaagccaggcgaacacctcgttctgagttttgggcgcgagtttccacttctggacaatttcgtaattcgggttcttcattgcatcgcccggagtcaacaccacaggcttgaatccttgcgcgaaccatgcccgacgccacgcgaggagcaattccgcatcggcgctctgcaattccttgagatccttgccattggctttgttggggttatatttcgcatcgtagtatgtgtagatcggtcgacgttcgcggaggggagggaggacggagcgagtctcatccaacgtgatggcagaggagaatgggttcaaccattctagggtgctgtaccatttcgactcgccgtgtgtgctgttgttctgttcttcgggctgctcgtgggagggagggcggaacgagggtaggtggaagttgcttaatgagggtagctttggtgtgggcacgaacttggccgggcctgtggctggttgctcgccgggatcagggatcggagatgacgagaaaatgaagagtaaaagcgcgacgaacacaattacagacaggagggctgtactcctgtgaggaatcatctttctagcattcaaaccagaggacctgtgtagaggcccgtcaaaagttgagaaaacacgtgtgtctttaaactgcgacacttctcctgaaactccacccggatttggccaattcagtcttggcgaaagaatgacgataggtatgaagagaactcagcacaacttctatctgaatctcttgctcagaatagaatccactggcttctaatgatgagccaaatgcaaaatagaacctttgataacaattttaggagctaggacggggatggtagttccttactttgagatcaaaaagaaatgatgactcagcgagcctattataaatgacctcatagaatgagacctgtgaacctctacgacatagaaactcttaacaaccagatttatgctcaaaatattccggtatctctcttaggatgatcaagatactttacaattatgttcctgatcatattatattgtgttcgtttacaagcaactagtaggaacatatttatgtcgctgtatgtagctttgatctaaacccgtacagctagtgatgtgaaggctttgcaaagtgagatatacatcaaggatattccaccaagttatccacacatatcttgggctggcatatgttatgttgtatgttgtacattcgtcttctgtctatatgccctcttcaccagaatgagacctctgcgatagttaaatgtctactcttagcaccccaagaatggctgtatagagcaaaatagtctcaacgttgtcaatgtgagtatccaatggaggaatcagacaaagggaatgagtatacgtagatctcctgtactcctccagttctgccaatctgtgccgctcttggctggaaaaaccttaactccgacgccaccccgctgtccaatcttggcaggcggtgaaccctctgtggggaaaacagctgatcagcgcctcaattctcattggcagaaatagcggcgagatcggacttttccgctcgttatgggggggtaattttaatattgagtcaccgtatcttccattctccaactcttttgaatatactgcaatcatggctgtgggaacagcctctttgcaggaccgcctggagatatgggcacaaaggttgaacaatctgactgtttccccattgacccgagattatcccgatacaaaagagaccgacggcaagagagtcattgaagcttttgagtctctgcgattccccaaggagaagcttgaggcgtcgtcatccggattcaccgctttcttaactgccttcattatactggtagcgcgattgactggtgatgaggacatcgctgtgggcacaaactccaacgaggatggccgtgccttcgtcatccgagttcccattgatgcctcggagtcatttgcccagctatataccaaagtagacaaggttcgtatatattttacttgttataggattcactactaaaagccttgcaggcctttaaggaggggtcttcccaaatcgtgcccttggtcagccttcgctcgtatatacaggagaagtccaagtccgaacgcaccccggtcctctttcgattcgccgcgtatgatgcccctgctgcctcccaggattaccctgcaaacaccttcgataccactgatttggtggttaacgttgcaccgggttcgaccgaggtcgaattgggcgcatactacaatcagcgtctcttctcgagtgcccgtattgctttcattttgaagcaactagccagtatcgttcgcaatgctgcttccaagccggacgaggctatcggacgtatcgacttgatgaccgaagatcagcgcgccctcttgcccgacccaacatccaacttgaactggtctaagttccgtggtgccatccacgacattttcactgccaatgcggaaagccacccagacaagctgtgtgtggttgaaaccccgtcaaccagctcccctcaccgccagttcacctatcgccaaatcaacgaggcctccaacatcctcggccatcatttagtacggtctggcattcaacggggagaggttgtcatggtttatgcctaccgtggcgtggacttggtggttgctgtcatgggaattctgaaagccggtgcgactttctccgttattgaccctgcctatcccccagaacgtcagaacatctaccttgatgttgcccgtcctcgcgctttggtgaacattgccaaggctacaaaagatgcaggtgaactttcggacatcgtgcgtactttcatcgacgaaaatcttgaactccgcactgaaattcccgcacttgctctactcgatgatggaaccctcgccggtggatccgtcaatggtcaggatgtattcgccaacgatgtggcactgaagtccaagcctactggtgtcatcgtcggccctgactctattccgaccctgtctttcacgtccggctcggaaggccggccgaagggtgtccgtggccgacacttctctctggcctattatttcccttggatgtctgagactttcaagctcaccccagacgataaatttactatgctgagtggtatcgctcacgatcctatccagagagacattttcaccccgttgttcttgggtgctcaacttttggtgcccgctcgtgaggacatccaaaacgaaaagcttgctgaatggatgcagaagtacggtgccaccatcactcaccttacacctgccatgggtcaaattcttgtcggtggtgcctctgctcaattccctgctcttcaccacgcattcttcgtgggtgacattttgattaagcgagactgccgctcactccagggacttgcgcccaatgtcagcattgtgaacatgtacggaacaaccgagacccagcgcgctgtcagctactttgaaatccctagctacgccagccacgagggctacctcaacaatatgaaggatgtgattatggctggtcgcggaatgttggatgtgcagatgctggttgtcaaccgctatgaccccactcgtctgtgtgctgttggagaggtcggtgagatctacgttcgcgcggcgggtcttgcagagggttaccttggttcccctgaattgagtgcgaagaagttccttaccaactggtttgttcagcctgaagtctggacagagaaagaccaagccgaatctaagaacgagccctggcggcaattctacgtaggtcctcgtgatcgcctttatcgcagtggtgatctaggccgttacacgccatctggagatgttgagtgctctggccgcgccgacgaccaagtgaagattcgtggtttccgtattgagctcggagagatcgacacccatctttcccagcaccctctggtccgtgagaacgtgactttggtgcgaagagataaagacgaggaacccacgttggtcagctactttgtacctgatatgaacaagtgggcatcatggttggagagcaagggccttaaggacgatgactctgactctgagggtatggttggtctgctgcgacgcttccgtcctctccgcgatgatgctcgtgagcatctgcgcagtaagctccctacatacgcagtgccgaccgttatcattccccttaagcgcatgcctctgaacccgaacggcaaggtcgataagcccgcacttccattcccagacactgcagagttaagcgccgctgcacctcgccgccgctcatccgcggtgcaggccctctctgaaaccgagcgaactctggctgaagtctgggccaagctcattcccaatgtgacatctcgcatgattggaccggatgactccttctttgatctcggtggccacagtatcctcgcgcagcaaatgttctttgagcttcgtcgtaagtggcgtgttattgacatcagtatgaatgctatcttccgcagcccaacccttaagggctttgctggcgagattgaccgcctgctggcaatggaatcattcgcgacgagcgatgagaagactctagctgtggaagctactaataagccggacgacgagtactcgaaggatgctgtccagcttgtcagtgaactgcctaagacattccctcaacgtaccgagtctatgctcactagtgaacccacggtgttccttactggagccactggtttcctcggcgcgcatatcctccgagacctacttacccgtaagtctccttccaccaaggtggtagctctagttcgggcaaagaccgaggagcaggcacttgagcgacttcgctccacttgccgcgcgtatggtttctgggatgaagcatggacctccaggctgcaagctgtctgtggtgatcttggaaagccgcaattcggtctttcccagtcagtgtgggacgaccttaccaaccgcgtcgatgctgtgattcacaacggagctcttgtccactgggtctacccctatgcgacacttcgaccggctaatgttcttggtaccattgatgccctcaagctgtgcgccagtggaaaggctaagcagtttgcctttgtcagttcgaccagtgctttggataaggactactacgtccaagaatccgaacgtatcattgccgctggtggaaatggtatcagcgaggatgacgatatggagggcagcagagttggccttggaaccggttatggtcaaagcaaatgggccggagaataccttgtcaaagaggccggccgcagaggcctacggggaaccattgtccgctctggatatgttcttggtgattcggtcaccggaactaccaacaccgatgatttcctcatccgtatgctcaagggctgcattcagattggccttcgccccaatatcttcaacaccgtgaacatggtgcccgttgatcatgtggctcgtattgtcattgccactgccttccacccgcccgccacgggcgttaacgtcgctcatgttactggacaccctcgtctgcgctttaaccagttcctcggtgcgctagagctctacggatacaatgtcccccaggttgactacgtgccttggtccacttccctcgaggagtatgtcaacgatggcgagcacaatgacaaggagtctcagcatgctctgtaagttacactcctatcggtccgttactgaatacaaactaaccttctttagtatgcccctttaccacttcgttacctccgaccttccctccaacaccaaggctccggaattagacgacgtaaatgcagccacagctctgcgtgcagatgccacctggtcgggcgttgatgcgtcagccggtgctggcgtgactgaggaattagtcggcttgtatgcctcttatctcgttcaaaccggtttcctgcctgcaccgaccgtctccggcgcccgccctctgcctgcagcgcagattagcgaggaacagaagaagaccctgttgagcgttggtggccggggtggtacatcttgaaatttataaaaagaagcacatgtacttatgtattctgattttaaaaagcatttacatttctcatattctttaccacccaccctcgtattcaaatgagcgattaaatgtgtggcttgtagagtacatatacaccggattttaggccgcgtaagttgggtttctgtttccgctttagtgctcatcccttgccgctttttgctcactgagcaccctgatcatcatataggccggatgaacggggtcccgaggtcccgaggtcgcccgctcactacggagtactgaggagccctaatcccactcattcactgagcgtgatctgatcgctctgacttactcactgagcacgactggattattgaagcggagggaatctacagtcgaaatgttccgaaagccccccaaaaaatagactatacactaaatccgttaaataaaaggctatcataaaagtttactatcttcacgtctcacacatttacgcactctgcatgtatatgtactataaacatatccaaaatagattcgagttagggccttcaaatcaatacacatgattgatcaatggcttaacacctaatctagtaggactggtgcagggagatcggaagactgtctgcgcgcaatcgaatgttcttctgtttatttgcccagacgcccttgcttagatcgagtctgccctcgtatggaacataatgtggagtttctttccttctgttaatggactcgtactagcactgtggcaactaagcggttctaggcagaccatgaaagcgctgggatcaaggatatatatgatcatgatttcccaccagcgagtcctatctcctcatacctcgtcagtcgatcgagaatacggataaaaccaaacctatattatcatccatcacgtcatcgatcaatccaacaagagaccatgaggaatcccacctgtccccaagatatcaagcccacccgcaccgccgacttccacgagattttggccgtggcaaagctgtacaccgacgcagtccggaccagcaaccctgaatgcattcacaaatccttccataaggatgccactatgtgcgggcacataggtcctgactttgccaatggaccagtcacagaccttttggaaataatgaaggagaagggtccagaacctagtttgatctcccacctgcatatcctgtcgacaacccctaccaccgccattgttgaagtagatgcagaggtggatacagttgggtttagagatcatttatgcatggccaaggtggacggacgctggcaagtcatgaccaagctttaccacttatatgagaagaagcgtgcttgagcgctggctttcttttgttcgagtgaccgatggattggaggtagtgcttgaatgtccgttatatgataggataccatcaatctatgtccattagaaatagcagccagaagttttgctcggtagattcatgattttgatgcagtatttcgtccaaatttatccctctataagcattactagcttattgctatccactccctgatccatcggatattttttgacctccaaagataattttcgctgacataaagtgcggaagtaaagcaagggggatcatcaccgtcaagagacggaaaaattatcctaggcgccgatattttatgcgagatgacccgtcccggcccgactctgtggttttgggtgagagatgtctttttccctgcgggtatgtctcccttgcatattgcatgtcatacactatatgcagtacaatgtagacaaatgtatgttatacgtatttcggagattctactggactgtggaccggtcaccctataacacatctcataaattcgatcattggggaaaaagcaagctttgtgttcagcgtgctgtatctaccacgtagaaagactatggcatgctggccccgacattgatattggcgccatacacagggcttgaatcctcgctgagcaaccagactatcgtccgagccacatcgcccgctttaaccaccgaaaatccttctttcctatagacctctttgacctcatcgctcgttttagccttgggtataaactgtggcagcaacggagtgtcggttatccctgtgaacaacttcttgttagccccatctagccgttctgtcatggaacaataagagctgtacctggagatacgctgttcacgcgaatcccgaatggaaatgtatctgctgccacgcatgttgtaaagtaggtggaagctcccttggaagttccgtatgcatacacatctgggatatggctcagtgctgcaatactacccacgttgacgatgctgcggtcatcagagggaagcgatttcatagcgcgaacctccgcacgggtgcagtagaaaacaccatcaagatttactttgagtaccttgctccattcctcatctccctcctccagaattgtaggcgagtttcggagcccagcaccctgggcaatgccggcaatgtttgcggccccgtgaaggttaccaaacttggccacgatactcttcacccatttttcaacctcagtgggcgaagtcacatctaacaaactgcagtgcacctctgtggctgggttgattttcttcatagattccttcagctcgtcaaagttcttgcaggatatatcgcccacacaaacagcagtagcaccgcgctcagctagcagtctgctagtggctgcgccgatgccagatgcaccaccagtgatggcaaataccctggatttcacggatgccattgggtcaggttgatttattttgatatgagcaatgatattcaaagtgaaagagaaagggttggagaatattctgagcgaggtattcgtgcccagaaacaaatgtctcccttcttcaatcataatgtagttacttctgaatcgtcatcccctccattgtgtacataaaattctgatctactggccgccagggccgtaagggacttgatttacattctggaaggataaaggatttcctatgtcgcatttctacgcaaggatagccacgctgggtagcattgcatagctagcttataaaaatgaagcgatagattttccgcaacaatatatcgtgcagtaaatggctggctgaacagtacaccgtaatttcctgatcctgaaagagcataccatgacacgatgcatcactcataaacacctcgtgaccttatagaggatgaaatatatagtttaggatgatattttgcatctgcattgcaacgtaagaaaactaaaattcagactattgattagcggagtaaaagcccatgcaacgctcttttcttgtgtgcctcatttaacttcaaattcaagccttgaactagatctgaaaactcatgtggcttatgcacatcggacgtctggaaccattcttctccgtgaagccggtctgggccatcagtaatctgaaagtggttctatcccgcttgtgatacagcttctacggcacttaggatctgtcagtaccaattaattagagatatacaggaatgaaaatagaaggactgtttaataactaatatcttaagattcctcaagaacaagatatcaaagctaacaggctggctacacccatttttgcttctcgtgctctgcaaaggtcctgaaaaaccttggtgggttccccgtcacttcttcgacagaaccgttgagagtttcctggggactatttttgacatcaacttccatcgcagcagacatagctgcaaaatctgcaggcattccaatttcgtcaaccagaatattggtatattctgcttccgacaaactgcgatgggtgattttcttgccgaggatcgaggtgagaatctccgcaacctaggatgtgaatcaagtcagttttgttcgtcaacaagaagtaggatataatcatcttacctgcccgtatgagaggagctctgggccttgaatgatgtattctgtcttatgcgagccccattctgtcaagcaatggaaagcaacggaggcaatgtcatcggctgagatgaaggggatcttgccctctcctgtcgctgatactacttgactctcgttcttgatccatgtccgttgggggtcttccaatagattctctgggaaacaaaaaacagtttagccactctatagtcctaagctatatgttagacaggatgaatcatacccatgaaccacgtcggcctcagtgccacatactcaactcctggtagagagtctagataggcgtggacctgacccatcgagtgatcgcctttctcaatattactggcactgacaagcacaaatcgctggactcccttagagcaagcaagatcaacgaattggatcataggtgggaccatgtccatggtagggggtccaaccagataaacggctgagatcggttgcaatccatgtttaccaatctctgcaaatgggttgtcccacgttgtcttttcataccagttgaaatgggaagagttgtatgggctttcctgtgaagtcgagctagatccaaccaggaatggagtttttgcagcatcaagaagagccgcaagacgactggccgttttaccccgtcccccaagtacaagaatagtcattgcaaaaggtctagatagtaaggcagtcggaaagttgtcttttgtatagctttcccttctggagaataattgagttggttacgagatattcagacaataagtactcagttgatagctcatattgaaccgtaaagcaacatgtgactaaaaatatgccggtctcacctcatgcttgactatgacgaattcaagtgcagatactatttttccttgtttgaacctgccaggctaatggctaaatgaggtctgcagctcccaggatcttccacaagtacacaaaatacggctccgccaattgaccgccattgaatatcaacatctcatgtatcggttgagctatgtataactagataacggaaagtataccaatcaggcggctatgacggaaacatgcacaatgcaagttagaactgatccttgctgagtcccatttgcgaagacttcctcgtgcagcgccaatacatcctgcattccaatttgagctcatgaagtcgcggtgggctagacgccacattttcggaaagtgatgcaacttttcatagtcgtggcaagctccaacccccttgcatattgaatatgtcgacacatcccatatgttgtagtcaacttggcagctcacgacaccaagcacaaaattcgctacacccaagagacatgtagtaaagaaatacgcgaacttcgaattccatacatttagggaaccccccggttttcaggtgtaccttcctaatcgggtacgtaccctgcttctgcctgccgcacataataccgccttccaatttaacataccacttttgtggcagaacagtaggtacctgtaatttgtatgtaaactgctaacagaactaagtcacttttgtcatattaactaatttattgtcgactgcatcatcgttaatggattaaaccctataggaattaggtagaatatacgtttatttctgatcaaaatgcatgttttttttactatgtataccagaagtgggcagaatatactctctacactggcagaaaatatggcagtattcttgatcgtaccgtattcggaaggcggtactgaaaattcaagggagcggtatcagctagatgttgctattcgaggcatgacggtatacctaggtataacgcgacctggaggattctgctacctatgtcaaattgtccgtgcaaaactccgcaacacaccatcaaagtctcgcttggacatttttctcctgacctatttcagccccctcaacgccctcttgcacccgcgtggccaattcggatgaaaccagagcgaaagtgcgatacaccttgtttcggatatcctgacgggtctgcgagactgattcgacaattctctccaccattcgatcctggaactcctgactccggaactcgggaagtatttcataatactcccgagcgaatttgtaatcatcctcatgaggttgagaccatacgtccgaagagacctgcgcaacccactcagcgaagtctttcccgaggctggcttgatactcagcggttgatgaggtccggggagatgcctgcttcgacaatgtcctccccaggcggtatcgctgtgcgtcagggtatgcgaagaggcgggcctgcaggatcggatcctcggaggcctctataccaggaacaagatgagaaggtgagaacgctagctgctcaacctcactgaagtagtctttcacgttgcgattcaaggtgagcttgccaaaaggccgggaagggattttctcaacaccctggggatatgttcccaggttccagtgcttggtgacgtcaagaatattgaagccaagatgaggcgcgtctttgggatcaataacctgaacattcgccgtccaagatggatgatcgcctcgctcgatggcctcaaagaggtccctggacgcaaagtcgggctcgctggaatccatgatggtgccagcaccatccttgaagttgggtccgcgatccgaagacaggaagaaatggacatatttgaatgagccatcgggcataacccatttgaaggcgtgtcctgagtagctgctcagagtgcgccaagtaaacatacgtccgaaatcactgtattgcagcaataccatatgaattgattcatgattctcggtcacgaattcccagaaattgttcgggttgaggcggttggtctgggggtctctccgttgcgagtgtatcatgtcggggaacttgacaggatcgcggatgaaaaagaaaggaaaattgaggaagacccagtcccattccccatcgctggtaaacaacttggtcgccatgcccttcaggtcctgaacgccctcggaggagccgcgctccagaccagtggttgaaaagcgtgttactaaggacgtctttttgccgacaccgaggagcatgtcgatattacaaatatcggagatgtcgtgggtcaccttgtcacagaattaacttctaattccaattcaggattcgaatgcgatttagatagtacctacctcgaactccccgtacgccccagctccaagggcatgaaccacccgctcagggatcttttcgcggttgaaattggacaatacttctagagtatggacatcttgagggccgatgctagaatggccggacgagggtgctttgcccatgactgggcatttcttcgcgtagttgggagccatttttttgctcaatgtattggatgaaagacttcagagtgaactgtgtcgttgagaactcggctttctccgggctaaatactactaaaatccagtatgcagaggtgtaagcccgcagagactaccttttctgagtatcgggtatttcctttctatctctctcttgttgtctgcgaaccctgcattgcatgtagagaagaatatcagctcccaacgtttcgtcacactttcattttggatgtaagggatgaactgcattccatcttgggtctgatcggaatgtagctatacatatccaggatttacacaccgtgtaatacctagtaaaatagcagtacatctctgggcatagatagcccttggaatggaaagcgcataactaaaaaggcttgatttggggagacacggggatcagatcctgagtctcctacatcttttctttttttttttcttcctgtgcatttcgatgtcactatattttagatagactgtagactttatgcatccaattgcgaaatctgagtcgcagttttgtcaccaactcatacaatcaccttttacagggcacattgattggatagatgcaacatttatgttgtaataataagcattcccgatttcacaaccaacttttgtatcgcccattattgattgacgtcaactttggcattcctttaacttcggacgtagccgtacagcacatagttagtgtcttctagcttccattttttcccttgcatatacaattaatttaccccatagtaataaattaccggaggctgaattgtacatttatcccgcataaaccagattaatctggatgcagtaaggtgggtactgagtttcaccacacgcctcttgagaaactgatatcacatgagaagttatcaatctgttgcatttcatcatattgcataataatatcgtgggctgttcacctcaaaaaaaaagatacacaattgcaacgtattcaatatctcaattaggacacatttggagctggtaaaaagaaacatcacagccctcaaccgaccattctttcacatccgtcaatcccgccgacccaaatagtacttgacgctcgtctgtatcatacttgtagctacatccgaaacgaatcttctcatgcttctcgataacgatgtcgttcaatgggcccccaagtctgacctccttgcccttcgtgatgagagaggcttcgtgtcggcctagcatatagttccactcactcagaaagtaccaatcactgggctgaaataccttctcccccattttgtttggagcgaacagggtgtttccatagtccagggacgctaaagcaaaaggaacgacgccttcagcagtgtaggcgcgcagcactttggttggcattttgcaactatccaggctcaggagaatagagctttgaactgggctagcggccaacgcgttgcttgcgatgttctgaagaaacttggctgcatttggccgcgaataattacctactgtcagtccaaacaataggagacagtgcggccggtcctgtactcccggggtatctttcagccactgcactccatcttcgaaagttccatgaagtgcaccaattttgacaaacttgaattgttcgtatgggagggactgcagcgtagattgaagctccgaaaagctcagatcgagtgcatagaacgtgatgttcttctttgatgcctctagtgcttccagtaacggtaaaaccttgtccaggcttctgtacagcagtgttagctatctttcaatagaaatagaaccactcaggtgatcattttactaacgcgctcccaagatcaaccactacactgttattggcaatcgaatcaaccatctcagccgctcgggcgcgtagaatgcgcagctcttcatgtcgtggatagaagtcagcggcggtagagtgttcaatccagtgccgaattccttccccgctgtagaagagaagagctggaagagttttgggcgtagtagacagtccagccgtgacttgatcgggaatggattcctcgaatgtgctctgacgtatgtcaataatgcgtgagttgatgatagtcatattttcggttcctgtattttgctagagaacatgaattgcatcaagaattgattctacaccagactatctgacggctcagccacatttaatcctcatctctggcggtgagcacacgagcatctttgtagtattctcaccaaatacatcgatacgtcacatgtattaaatgagcaagtgagctcagcgtatctatcgccaagttttccaatgatcgtcgtcctgtcctgcacataccctccgagtcccattcctcactacccactcctaacttgctgatcaaaagcccctctcggtcccaccgtcgcttcagctgtaacaggcgggcgtagctctgtccccaatagacctgttggaaatccttttcgttcgggtcccccacgttacgataggataaccgaaacctcgggtcaatggcataaagcaagggcatgtgaatattcgtaaggttttgtaatgcacctgcttttccttcaatagtcggctcaaccggtcgcacgaagttgatcagctgagtagcattcctccaagccggatgcatggacgtctccatgaggtctccatttctcatgacttgccctccgaggttactggtgaacaatagatcgcccggccgcgtggggagttgggccagaccgtcggccacgtatgcaggccccttggaagcattgaataagtcgttagaaatggcgacagtggacccaagaacaccgtagtcgttatcggtgtgaatgtcgggaacctgtcgatagttcatgctgagtttcggcaatgatgttgattcgtatgtcacatgagtttcaatgcgcctcatatcctcaacaaatggctgcattcgctggtcgacatccgccgtattggtttggttcagaaagaacattttaagttttgcctcaatagagtgttcagatatcacagtgatgatcagctgcccaccaacattttcacggttcaatgactgcaggacagtgaagaatgcagcaaggcttcgagaatattcgccgtgagattgggatgtctgcacgccgagctcagccgcaatagcagggacgtcgggaaacactcgcatagtagctcgcgtaacaattccaaaagtcccacctccacccccccgcaatgcccaaaataggtccggattccgaatagcgttggccagaacgatgtctccctgtctcaaggttagaaacccacaatattgtatggcatcaggctctggcaggcttacgctagcggtcacaacttcaaattccagaacgttgtccactgccaatccatggtgtagactaagaaaatctgaaattcctcctccctgcaggaatcctcctacaactccgactgtaggacaatcgccaccgacaacaatgtatccattttgtgcggaccttgcgtataggtcccccatcataacaccagctccaacactcacagctggaccgaaagacttttcaaatccgtggagctgaacattatcgtggaatttaatatcttgcagccggtgggtatggatctgcaatgcattgggcgagctggatcgacccgctagatcatggcccgtgttccggatgataaggcgaagatcgtggcgtttagcaaacattacggcttcttgaacatgctttgtggagttcaccattgccgagtaaagaggaatgcgcccttggtggcattgggtatgaccattcatctgagatcccaatgggcatgcatcaccaggggattggccagactcccatacccaatcctgcaatgcacctggttgatagtctcagctgaggaatcttttttggaggtacccaacgtgagtgccaggcttaccaggttgcgatgccctccatccactgtcccttgacatacgcatcacatcctcgcataaggtgtgatcgaggctatggttgtaacagactgatgcaataggttgtaacctaacaagagtgaactccatcgatctgtttagtaattcccattgttcatccgacggccaacagggttcccacggctggcaacgacatgaagactgtaagaagtgtgtaaataccagccaactgagagctatacctagcccagcagtccccagaaaatgaaacatcattgccgattggtggtggatttctatcaacaaaaagaatgtgcatagatgcggttcagaattctgtaaatccaacccattttatgcttgcattcaactaaaaggcggtggccagccctctagattatttgatgagtttccaatattacggccaagtccgagagcaaagcacaggaacatagttcgggcctacccgcagtgtagatgtaacgtatcgagagctccactatatacgtaaagggtgagaatgaacagtatctcgccatatctacgagagtgttgatataatcaatcatgatcagctgtatgtgtgctttcctgcaagtctttcatcccttgattctacggtgtatcttgcatatttatcctggtttccgtgatcttcatgatcatcgaccattctattcaatctatagccgtattcactgtggaaagatatagtgtcagctttggaaatatatagtgtcagttgtagaacgtatagactgcttcattctacaactattctattgtgttaagcagctgtcactatgggctccattgaaccacctaatgcttctagctgtcttgtataccagaccatcactgagtttgcagacttccccgatcacgatcagaagctatggtggcacagtacggcacctatgttcgcagaaatgctcaaggttgctggatatgatattcattctcggtacaaagctctcgggttataccagaagtttatcattcctttccttggtgtctaccctaccaaaaccaacgatcgatggctcagcatcctaactcgatacggcacgccttttgaactgagcttaaactgcacccactcagtggtgcgatacacctttgagcccattaacgctgccaccggctccctgaaagatcccttcaacactcatgccatatgggacgcactcgatacactgatccctttgcagaagggcattgatctagagttcttcgcgcatctgaagagggatctcactgtcaacgaccaagacacggcctacctcttagagaaaaagaaggttgggggccaaatccgaacgcaaaacaaactggccttggacctgaagggtggcgagttcgtgttgaaggcgtatatatatcccgcactcaaatctctggcaaccggcaagccagtccaagagctcatgtttgactctgttcatcgcctttcccaccagtacccgactctcgccgctcctctccgcaaattagaagagtatgttcactctcgcggaacttccagtaccgcctctccccggctcatttcttgcgatctatgtgacccacgtcaatctcggatcaaaatatacctcttggagctgaatgtctccctggaatcgatggaggacctgtggacactaggcggccgacgaaacgatacccaaacactcgctggattggagatgattcgggagctatgggacctgatcaaccttccaaccggtattctctcgtacccggagccctatctcaagcttggcgaggtccccaatgagcagcttcctctgatggccaactatacccttcaccacgacgacccaatgcccgaaccgcaggtctactttacgactttcggtatgaacgatggccgggtcacggatggactagccaccttcttcaggcgtcacggctacacccatatgctgcagacatacagggatagcctgcgtgcttactagtgagttgaaacaattctattcactcaacccgtctaacaaaatctagtcctcatgtggatcatgacactgtcaactacctccacgcctacatctctttctcttaccggaaggggagcccgtatttaagtgtctatcttcaatccttcgagactggtgactggccaatctgtgagtcaactttctactcaaattcccatgatcttgttttttaacgcggttttccctcttctctcatctagctagcttcggtgcgcctatccttgagcctgtctctaagaagatgtgtcgtggccatcctgtctctttcgaggtacctttgacaaagcagcaggtggtggccagtgagtaaaagaaaccatatttggcgactttcaggcatagggatgtgaccagaaagaaacactaacgcgaattccacgatatcgcggtatggagttgatctagatgtttttcgaggagatgtgcaatccaattgatgaccggtgtaaattgcaggctagatggtaggagtaggttaaatgatttgctggaatatatgtactcttgattttctgaatattgatgtcagctttgaaatggatgcttcaacgcctagaaatgggtgtatgcggagatttgtatggtgggaatagcttcattttttggggaacagactttgcttattaagccctctgtcacatgcccaggtggggtctaaaataaggcagaatttagacacattcaggcatcaaccctgcaaatcaggcatatgacctttggcagctctgccctttcgcacgcggcctagaatgggtacgtacacgtacatatacaacctagatagtagagtcgttcgattctgaactttcgaaaatgcccaactcgccaatctgcgcgtttgtactactcgaactgattgttttccccagtctttacttgcccctctcacttgagaattcatatagttctaacaaattccttcttcttgctctcctccatatctctcttcactgttagtactccatcatgcttgaaggtaagtgtgtgagcggtgtttttgttgtatgcgcgttcttggcagttcaacttccccggtcaaattttcccgctctgcttcttatctcccaatcaacccgattcagattgtcggagccctgtgagaagtccacgaccggttgttggattaattgtatccttgatcgtctgtgtaatcctgtctttctcagtcggctttcccttcaccaattcctgtcaacccgcctcctacctttttcccctccatgggtgtcgcaagactcaccagacgaagcggtctcattgcgcgcgcagtgtgggattccaagtactcaccgagacccctgctcaccacgcagtctctcgtggcgcgcagcaagatcgctctgtccccgcatcacaccaagcccttctcaacctccccatccctatcctgcgcgagacaccaaagcaccagcggagaaccaccgtcgatcgcggaaccacctgccaagcccaagaaccagacccagactgacattcctggtgcggatcccgcagaccgatatgcagcaggcctgcgcctgaacaaggaatgggctgcccagacagcccgcaaccagcccgagctcttccctaccctggcctcgggccaaacgccgcagattctgtggatcgggtgctccgactcccgctgccccgaaaccaccttcctaggcctgcagcccggcgacgtcttcgtgcaccgcaacattgccaacatcctccacccgggcgacctcagctccaacgccgttatcgaatacgccgtgcaatacttgcgtgtcaaccatgtcgtggtgtgcgggcacacatgctgcggtggtgtctcggctgccatgggcaataagaacttgggtattttggatccgtggctgtttccccttcgtcagctgcgcgagcgcaacctggaacttttgcagtcaatgcctgctgaagaggcgtcgtcgaagctggccgagctgaacgttcgcgagggcttgaacattgtcaagcagaagagtgttgtgttgaacgcgatccgcgaccggggactgcagctgcatggcttggtttacgatgttggatccggtgtgctcagtgagctggacacgcaggactcggaggaggttatcagggcccgtttgacggcttttcaaaccgagtgagttagcggggttttttcgggcttgggactctttcggccgaaggccacgggatgtacggagtagcagaagcgagatttgcggagtaggacatttctggatagcgacagtgtgcatttgatgaattgatgataattgtaaagtaagatttctctttttttttggcctagagggatctctcgttctctcagaatgtaaacatgatggcatgatgtgtgggtagccgatgcgatggaaagaccaatcagaggagacggtgaggttatacgaagtatgtctgccaaattgggaggagcaggtatcttttgtatagcaactccatacaaaaggtacatatacacctagacacgattaggtgcatgccacatctacctatatatgtccatagccttgcttgtcttatgtttcttcttttcagttctgtttgtattctgcaatatgccagtgatctaaggcctagatggtgtaacctcgaccgtttgactcttcacagtccttcaccgacaatagttatagacaaaaaatgacatcagtaccatgttatagaaagaaggttatcaaatatacaggcagaagcaagcaaatggtttaaatcgtaccaaagacgtgtctcatatacatgcccaggcggacaaacatataagggtaatccttcccacgtccaaccttccaccatccacctttcttctctgagtactcttctcactgaaacttctgatccccttccagtttctctgacttgacatccattatgaagatcgaaatctatgatggagttggtggtaagtctatattccttctgacatttgacctatcattcacatgccaacgatcaaagctgtcgatgatagcatcacagaacccgaggtccaagaaatccagtatgagcctgagggtaccctctgtgatgtccgcaccctctaccagaaaagttccgatggttggggccaaccggtatggaccaaagaaatgcccatcgacttgcccgcacccgtcttggatgcagagtcagcacaatacgcactcctcacgaagaaggtgaagtgcttcgatggacgcaggagcttgtcgattcattccgtcgttgtgcaaagcgagcgtctcaatgagttcttgaaagaggcaatgaagggttatcctagtgtcgccctgaccttggatcgccccgaattctgctcgcctttccgggctttcgttcatcgatgggaagaaatcaccaaactgcgggacgaagtgcaggatccaacaaccaaggcccatgtcgacatgttctaccgcatcatggacgaggagctcagggatgtcatcgacagcaagaatgagctggttgccaaaggggtcatcacttttgagttggtttggacaatcatcaaaccggacgatgtgatcctttcttcggccaaggaagggctccgtgcttattcgtccacacgcggatcgtcggacggtgagggatcgccaattgattatttccaagccgaatacgtcgaattcgacggaaccaagttcggatacaacaccatggatttcatgatcccccgatttgaaggcgctatgccaatcacctcgttgactatcttcccgctcaaattacaccccgcgaaggaggcggtccaggagatgttgactgcacgaggcaagaagtgggaagccctcaaggggtaccatttcagatcctatgattcttcaaccagcaccaactccaagggtcatgtcaagaatcgcgtcatcattgacgcccaggcatacaacaagtttgcgcaccacaagacaatcaactttgatagggagattggtgaagaactggatgatgctcagcgcctcattgcaaccccaatgctcaacggatatgccctgaatgacaaaaaatggcgttcgttccacgtggatcatgtgcaagacattgattgggatgagcaggcttttgagtcactggtcctaccgcgggagcagcaggggttcaaggacgtcatcttggccgtcgcaaaggcccagtcccagaaaaaggatacatttgacgacgtcattcggggcaaaggccaggggttcattgtccagctcagcggtcctccaggtgtcggaaagaccctgactgcggaaagcgttgctgaggtcatgagggttcctatttatgttatgagtgctggcgaccttggagtcgaagccaaacgcttcgagtcaaagttgaaagacatcttggagctggttcccaagtggggtgctattctgttgcttgatgaagctgatgtcttcatggaagcccgcgattccgccaatctcgatcgcaatgaacttgtctcgctcttcttgagaactcttgaatactacgaggtaagctctgaatttgggcgaagcgcacaaatgacatgatactgatcttttatctttctctccagggtattctcttcttgaccaccaaccgtacgcagaacatcgaccctgccttcgattctcgcgtccacctttccatcgcctacaaggatctcgatgcggaatccaggcgccaggtttggggacagttcctcagccgctcgatgaacattgaagccatcacggatgagcaacttgaccaggtggccaagttgcaattgaacggtcgccagatcaaaaatatcatcaagaccgctggtcttctggcttgttccaaggagcgtgagatccgatttgacgatttgcagacggtgcttgctctgagaaatttgcagaagtgatgcctggtgagacaaggggcatattccgtacttcatgatgtgagtgagatggtagctggttggaaacatccatagacttgatattgaaatccaaaaaagcatgattttatgcgcaattttgtgtctgtaaaaggcggaccggtgaattgcctcttggttagttttgctgtttaggtttagcttctgtaacataactaggatggatactgttatttttcattcttgatacagaccgatcaggtgatgtgactaggattcaggccgaaacgtttgtcttgtttgttgtgatttgattactagtacatttgttttgtccaccagattgtgatttccggactacaacatagtattgtgaatttagagagtttttattgggattattatgccacgtacacacttgcattaccaccgtttatctgtcaatctcatctctttaccacccaccgccttgtctggttgtaaactgtgggctggtactcgtaaagcatacacattttcagacacatgcggcagtgtcagatggattccctgagggtgaggggctgttggcacataacagcttggagaggagagggctggtgagtaccacacttcccatcgtcccccgggggactgaaattgcctcaggaagatggtatcctggtaagtgctaatgagcccatattcgcaattcaacttctgcatatctcgcaggggttacgcgagagtgcgccgaagctctgtcctcatggcagtggccgctgcaagatcatgctcatcgacccacaattctccagcttgattcggttgtgccatttgcgtcttgggttccttcgggcggatgatccaggattctgatccgtaggaatagttttatagatcccactggaagacggattccctatcgggttggtgagtcgtcttggcgaaacaattggtcctgaaggaacgataggttcattgaccgcaatggtagtctcctgatttagccctacaacgtcggggatgttggcatgtacttcctgaatacttataatcctcaaagtagatgtcgattgggtggtttttcaaggctgtcccaagtacatggcctatggcctttgaaaactgccccggagaccgggctcatcagtgatgtacgcccgcgtccgtcagcatttccagtcagagctatcacgcatccagtccaccctgtgagctgacctcaccaatctcaaaattgcgtatgtcacatcggataatggtgtaggatccaagttatcgggatcacggaatccagaaatatgcccagaaagcattagctcaccattatcgatgtttgtaggctgtcgtagccacctacatagatttagtggtggcctcatcataaatgagtttcctcaaacagcaaattgacgatgcccatacatccttttgtagctctcttcttgatattagtactggtatacaaagggagtatatatgatcttacttataagtagcgcggaaaacggaacgtacctcctcccggtattcgagatcacgtttccagtaaggaacggagttaataggttcaccggccacccgcgtccacacgacataattgatataacctccagggacgtagtctcttacaccttgcacccggtcaccatgaccaagtaactttgggattgcagtgcagttcttgtgatatagactttatcaagctcaacgccatcgaacaacttgactccgaaggggctcaggtagcgaaaaacatccaccagttaggccatcagaaacaggaatacatagcttggtacaccgacgacgcgacgacccagtacgaggaatacaaagactggataaatgggtacaataaagcccataccgctgagaaggaacgtgagatcttagccagggaacttgctgcccaggttcagtctgtcaaaatggatttctctggggaggttttgaaatctctgctcctccactacgtcccaaacctcgacaccctgacgcaggaggaagcacagcaggattgaccttgcaatcggatttccttttacaccaattttaatatccatttttacaagagccctcggggcgagggcttcttcggaaggggcgcctgttgccacttggtcatgtgaccgggccttccttagtgtagctcgcagactagcttaatcaatcatctcttaccatccacactagttgtaccaacttggtagcatgtcttgagatccacatcagcgggatcccctgagctagaaattttcttttctagtaaaatagccatcggagaccctctgcaaagaggccagtcccccagattccccgacaaagccagccatcactggcaaaatcatcagtttcatcagagcggatggacaaacagctccacagagccatcctcctcgctgtacagctcgataattacatccagctcgaccaaccttgtgctgacgaatttgactctgacacgaagtcaaggatcagcttcctactgagtccccactttaaccatcccacactacccaaagcagaagatccatacccacctgactggtcgattcaccgaccaagcctccataaagcgactgtcgaatttattaggctttcccctttcatctctccaccgatacaggacttatgagagccttgacatccgcgtgggtatgctgagtgagagcttgctgagctcgagcttgagggggagtgataaatagtaccgtcaatcggaatttgatagtagaaccgtataaagctctgttgggtggggtcgaggaggttatggcatgagaaattaagtgccgcaaacggatggccgaggtcatcatcatgttcttcctgtgtcatggtttggaattcttcagacaatttatcatcgaggacaaatgttgcactgggtgagggggaagaatgttcaagcgttactttagtaccgtgtagataatcgaaatctcctagtcgagacattatgatgaatagagagagaaaagtgcgagataagagaaatgaaagagaagtgaagtgcagagagaagagaagtgcagagagaagagaagtgagagagaagacgagcatagcatatccatggatggaatatagattggtaattaatgccttctatccgtattgaccgtattgtaaaatgcaggttcaacttctgtatttctgtatcgactcctaatttgacttcgtagttcgttaactaaccggcctttgcatttttttacaaaaattacagaccctcctaacgtacgacatgtttgcagatgaccactcgctacttacccaacatggaggattgataaattctctggtacaccggcgtcttatactagtatagagcttctccaagagagcaaggtgctatgatgcagaatagtggaaaggcagccgtttctaaaagcggtaacttcggcataattattatcttatgcacacatgcaagttgccgagacctccgcttgccggctaagcaggcaacacccaaacatcctcagccaagacattgacatctcccgtcaataatgcaatcttggcagaacttggaaaccaacgaaataatcaatctcatctccagttttccaatactccggcaggccccgggggtggcccttctccccctgaaccacatctagaacatatagggctacggggctcttcgtattcgcataagcagacggcccactccggtccatacatgcgttatgttgccctgcaatatgacaacaacatggcctcttaaggctgaacgaatgacatttccccggagcgccgatcatcgtcgaaaagcagggtacacagcgcctaaacaccacaccatgacaccccagggctgagcaaagacccccttcaggtccaccttgtgttggctagtgcacccgcacgatccgaccatttgacaattatagccctggcacaattccgatagcatgttgtggagccgagtcaagatctttgtcaccctatttttccctgttttccctttttttttcccctgccccttatatggtataagtataaacggattgaaaaacagtccgtgttgaaagatttcctcatgttggccgcttaagcgctgggccattatgattgtcactcgttttcatcatccgcagcgcttgattttgtcgattttggtgctgtccggtctctgctccaagttgctgcacatataccagcatcgatcgcttcctctataccttttggcgatctatttcccgacattctttattcaggaggtcctgctattcgttacagtatggattctcttatatacaacctccggtcggtgggcagtagccgccgttatcggttcagcgattatcgcgttggttcaccttttccgaaatgcgacgcgcaacgatattgacttctaccctcagatgcactgatttactagcaaccgcgtcgcagtttagtttttattctcagaccggcagcgaaattcaatgggatgcagccaggtccgtgggcgccagtcgacagggacagaagttgatattgagcggactggtgccaatggctgccactacaacagttatcgtcgtggcttcgtggcttatggcccaaggaatctggaatctcatgacccgctggctatgctccctcgcccatctcggagacgccaagacttccgccgtcttacccggcccctcagatttgagaaatatactagtgtcaaatcgacctcggctttggacgcttgtggggactggagtcacgatcggactttggctgattcgcccagcaatcccatacaatcacatgactggagctctgcccttcaccatgctcggcgaacactctcgggctcgtcagatgaccatcgaaacatttccgctaccagaattgctagcggagcgataccgggaaccggaaaatggacactacaaggggtgggcaccgacattggacgactcgagtaacactgcctatggaaaaaataagccagcctgggcgcaaggccctcttcctgctgcattcgagagatggattgtgaatcccgattcaaatacggccgactcgaccattcaaagcctgtccaggagaggcggaaacaaatcccactctgaaggccagaataagacagctggaccgcgacactacttctataaccccgttcaagatcccctgaggataaacaatattgacctggaaccacttggtcctctgcaggaggctctgaaggaccatgccatcccaatcaaccatatcgtctttgtgtttttggaaagcggcagaaaggatctgttccccctcaagaacgattctcgactgtacaaccaaatccgggaatcatatgaaatatacggagaggaggatgaagccgatctgcacgacaagctgtcccagttaacacccgtcgcagagatgcttacaggggagccatccggcttcggcgcttcggtgagctcaccaaatcccggactaggtggtctcagcttcgacgggatagtgtcggggagcagtctctctgcgaaatcgcgtcttgtcaactactgcggtcttggaccgctccccgtggactttatgcatgaaaatgatatcatcccataccagccgtgtctgatgcacatcatggatttattcaaccagcgcaagaattcttctagctctaggaattctaccgatagtcacctggagcgggaatgggaaaccatctatgcccaatctgtcactggggagttccaggagcagactcggcttatggatctgctcggtttcaacaagacattgtactcggaggacattgatgtggaggatgcgaagtatttccatgaggatatggaaaagatcaattatttcgggtatgttatcacgcagtatacccagcaactttcctcgtgtgtaaatactgactttgcatagttatgccgaaaccgaggcccgcccctacatcaaagacttaatcgacgaaacgcttcgtcagaacaagagactcttcctttcgcatttcaccagcaccactcaccacccttggggtacacccgagggctggaaccgagagcactatttcggtgatctccacaaatcacaacacgaactcatggatgatttcctcaacgcaaaccacttcgttgacacatggctcggcgacttaatgggcctgctcggagaagccggcatcgccaacgagaccttgacagtctttgtgggagaccagtacgtgcaattacccaccagtgaccaaagaacctgacatctaaccaacgaaacagcggccaagcatttggagaagactgccccatcacaggaacctaccacaacccacacatcagcaatttccgcgtgcccctagtattccaccaccccctactaccccgcatgcaccttaatgtcaacggcagcgccgtatccatcctcccgacgatcctcgatctcctagtgaacaccaactccctcaacgcagacgacaccgaaatcgccctagatctgatgaacgagtatgagggccagtccctcatccgcccgtatcgcacctcgcacaacggccgcgaagcctggaacatgggcgttatcaatgcgggtggctcgatgctgagcgttgcctccgctgctgtgccctggcgtctcaacctaccactgaacaatgacttcgagtaccgcttcacaaacttgaatacggacccgtacgagcttgagcctatcaccggctggacaatggactctcttgctgcggaggtccattccaagtatggacaggaggcatttgaatgggttcaaaaggccgagaaagttggcatttggtgggttgcggagcggaaaaagctctggaattatagtgatcctgatgagtgaggggtcgtttatgacggtggatacctcatgttttttttttcttctctttttcgtccttggagcgaacttgcatagcatacattctggggtacatgttttgtttttgaggctgtgggatagtttggttccctaatggctttgtataatattcgggttggtagacctgctgtatataaaaaatatatgaatttcgccttttttctaagattccgattagacacttcaatcattaatcagtatctgcgtatcaatcaggcctattcatattattttcactgtggtttccttacaagacttctcccctgactagtagatttctttttcacatcattggggtgtgttggcgacccaaaatatggaatttgtaatgctatccggaatattatttagatttctccttcttttacaagtgagcatatcagatcctataagaagggtctttctgatccaaaagcctcatataagcagacatctccttcagtccaaacttagaccccgaaaaccctttctctcgggtggcattccaagttctctcaattttgatctcctctggctgaatcaggttccccttgtccccaagcgcacacgccgacgcatgagattgaatctcagaagcagccagcaattcatacatcaaataccaagcagcactaattgtctctgcagctgtgatgacaccatgattccgaagaatcatggtatcagtcgagccaagatcttcagcgagactcttctgctccccgcggttcgtcacgataccttggtagtcatggtagctaacagggccagcctggtgcgtcgtctgcgccaactccagcagtccatccttagtgcacgccagtcctgtcgcagggggataatggcagtgcatgacgcttgccacgtccggccgagcgcggtgaatggcactgtggattacccatccggcgtcgttgataccgaacgtgtctcctgtcacaccgtggtccttgatcttgccgtccgcgccgactttgatcagacttgatgccgtgacttctccgtatcggagaccgaacgggttgatgaggaacgagtcactgccatcttcttccttgacctttgcggtgaggtggttgtagatgttttcgttccagttcttgagttcaaagaggcggtaggcggctgcaagttcgattcgagactttacttcttcgtcggggagccatttgaggattgattgtccgagcattttgtgaactgcgggggaactgtatttggcagagggcacgtgtgttgcgggatcaacggctgttgcataacttcgtggtagggtgattgttgtagtgcctatctttgggatacgggctcggagcgagcctgtgggaatgcggattgcatgtcgaagaaccgatggggcggttgctaaggaggccattttcgatgtccacggtaaatgtggtttatgacggtgtgatgaacgtaggcaactctggcggagatagtgaaaggctgtttgttatgctggaaatgcctactaggcaaggcctttttatacttgccagacagcttcacataacgtaccttgatagctctaccacagatacgtcaccgtgagacaatgaagatatgccaacatctcacaagaaaaaaaaaacgtttagccaaggttgcaattcacacatggacatgctaagcattagcaaggccaatcgggtcgtcgggaaagtcggcataagcttgctccaactaactttatatcatgattacaccacgacccaggcgtggaatcttgcttttgctgaaactgagcttggttgtaacttgtcaggaactcaatgccatactgcatagtcaacggccacaaccttagctaggagagagtgcgttgcatcgattctatatttccgaatttgtctatcaaacattagcaatcggcgtgttatgtactcttcgtcgaataccaatgttggatatatggtcgagtatcggatatgatacccacaattatgtgtccatagtaagtggataccacatataattgaaattgccaccgtagaaagaaagagaattacacatcatcaagatgacccattcaatacataacctgttcagtttcaccatgaaggctactgatcctgaacatcacgtcaaggtgcaagttttgcttgggtgccattgcaattgagagatcacctgatctagcaacaacataagctatttggagtcactaccataaagcgagaccacctggtctattaattgctctatggctggtacccacatcataccctcaacaagcatgtgccaagctgaggcaagccctccatatagccttggatgattgagttaactacggcgcactggcggttggagccgtgatggcagtatccaaggcggtcagcccctggaaatgcaacccattatgaagtgccaagtatgtacacaatcaaaatcaagactcggagaattatgcttatttagctaaatttggagggcgctagcaaaatcggggtctaaagctaacaactttatagtccattttcaatgttgtcgccctgtagacggcgattattaccgacagccgagaagtgctgacgaggcctcatggatttgcggtccacttgaagatctttatagagcctgacggggaaagagcaccgcattttcacgtttcacccccttcgctgcgtcagatgatccaatcataaccgcctttgtttggccctcctgcccctaccattcgcccacgggactgggcgtctcctgcgatccgcacatatcttgccttgtctagaccccagcgatggtgccccttccttttctcttcttcatgacttccctataccacgctcgttaagaatgctgtttttgtgcttatcgtggctgtcatggctgtcatggctgtgccaaaccgcgctggcgcaatattccagcgacgatctcatgtcattcgttacagttcgtgtctaacatcccacaacttgaaattgtatgatcgctaacaccgtgttctccagctccccgatattcgggcagtgaaattcaatgtccagtaccagaaccgcgagcgcgtcagccccggttactggttcgtcgctccttatctacacatcggccccgacccaccgtcgaccttgtacgagcaatatcaaatcggaccgcatatctacgatggtgaaggagtgcgtttacaccagtcccccgcgatacagatcccgacagctgaccatatgtcggtataatagcgccttatctggactggctcgcaacagttcgagaaccgaaacgtgttcgatttcaaagtcgtcaacagcctaggcccggacccacacctctcgatggtcttgcagaactcgtgggatccggcaatagacaccgggtacggggtgatcttgaccaacgattatcaagttcaacgaaagcttcctttgcgaaaggaccttggctcttttgacatccacgagttcaatattctggacgacggtaagactgcgctggtcacggtctacctttctcatgaggttaccctggaggacttcggtcgcccgacagagactacctggcttgagaccggcgggtatgctgagattgatctgaacaccgccgaggttatccagtcgtgggattcttataagcgcattcctttgcccgaaactgtgcattacaaccagttttccccagtggagggacatcctggctgggattatgtgcatatcaactcagtcgacaagaatgaaatcggggactacctgatctcgtcacggtttgcgaacaccatctacctcatctcctgcatggatggaaatatcatgtggcgattgggtgggaaatacagtgatttcgagcaagatttcacgttttcgaagcagcacgacgcgaaattcatcgagtcgaatgggacacaccatatcatctcgtttttgaacaatgcctcggacgaggaattcaatgaggaaaatatatcatcatccctgttcgtcgagttggataccggcgcgaggcccatgaccgccagagccatccggcgctacaaccgccccgatggccagctctcgagactccgcggcaatactcagctgcttccgaacgacaatgtgttcacttgctggagcaaagagggctatatttctgagtatgccgccgatggcgaactcttgatgaccgctaacttcacctcctcacgctattcatcataccgcggatacaaatttgaattcaccggtcgtcccacggccccaccagacatggtggcgtcggtctacggcacggatgcgaccaacatggtgaccacgttctgggtcagctggaatggcgcgacggatgtcgcatggtggaggttctacgcgcaagcctccgaattccacgaccctgtccttatcggcaatacctcccgatccgatttcgaaaccatgtacattgcccgcggatatctggactgggtgtctgtcgaggcagtagatgtcaacggcaccgtcctaggcaggtcggaaatgcaccgaagcaagtcccccgactggaaatctgtcggatacaaagggaaatcaagcccacctattccggccgacccatcgatcgtataccaggcaagcgatagcgcagcagaagacaaggcggttggcgactctggccagatgtcatcggatgcaatcgagacccaaacagagaagaccacccaagtcctcaatcacacatacaatgctatccgcagcattggcggtgttttctctttcgttctgcttctttgtctgtttttcgctgtcatggcatcctatttggtcatccgtggctggcgactccgggtctaccagcgtgttcgtacggaagatgggggttcagaggagcgggcgcatctggcaccgttgcatcaggattgagtctctttggctttgattggaagcatacgctgtttgcattatttgcgggagttttgtacgtcattttctgggtctttgatgggctcttgtccaatgtgtatatagtacttgttattggtttcgccgactacctggccataggggagggggggggggtttggcttttgcgatatcccgcgatttgttcatattaaacctcaactgtgattcagttctgatatgtggaatgaccttgtttgaagtacgatcggcgacagagccaaatggaataattgtttgacttaagggcttcttcctaaacctaggatctcgtgtaaacaaacaaagaaggcgcaatgcatgtgacattgacatggacagggaagatgcgagggagctgtcgcccttaaggaaggcaccgtttgtcgagggtatcaaaggacccttccccccatttctcttctcttcttctccttctcctctccccatctctctggccaccatctcaccgtagcccacgagacagcgcaggcagggggacccgtagcacatgctgcttcacctaccacagggaccatgaaattaccatatgtatgaggtccatgtaggtctgcatcagataacaaaccgggctttctcggggacgttcctgaagtcgtggctctcattgccacttgacgagtcccacggaatacatgaggggtgtaaatcttcgtagccgagggcgggtcgcgtaggtttgacctccatgtaagcatcgaagctcagctacctgactggttaatggatcctcgctcccctcatgtcagcattggaacctccaccagggctgatccacagatgcttctttgatattcgagtggatcccactgtttacaatgagatctaggtcttgaagacatcaaccatgagaccctgcacagtttgagcgttgggaaggattgcatctggccacgatacggtgtactcggactttatgcatttctctcgtgatgcaggcagctcttgtatcggtcgccgaaactcttatcatggtgatacaaacccgaacaagagaagagtaagaaatacccctcatgaggggtatcacttgaggggcatcttgtgaggtaaatctcaactgactattttatgtctcttttgatcgtctattccagagtgtccgtcaggaaatcgagacaccggtcgagaccctgtgttatctcaccttggaagatatcacacaacatacctttggatatcaattgagactgtttacactattggagaggccataggaaagtggtcctaccccttgttccggcccacaaatttacttgataagaactgaaaatgcccgcatcgtacggcgcttattcccgatactgacaaatctcgggaataaaagtcacagcattcccgaagttattcccgaagtgtctttcccgttatctataatgaagtactccccgtacgtactctggttcgactctttctttttcgtcagtcatttcctagagctcaatcttggaacccatctgtttattatccaaccaaattcgcaaggaattgatacccaccatgccctcaacaagcttatgccaagatgaggcctgccctccgtacagccttatggatgattacagtgaaggagcccacccacaaatcctggaagctcttttgcgaacaaactccacacagcaagttacatttggaaacgatgaatacagtatctgtgcacgacaattgatccggaacaagatcggttgcaccgaggacgaggcgggtgtcttcttcgttcccagcggaacctccgcaaacctcatttcaatcgccagctgcctaaggccttatgaagctgttattactctggagtctggtcacatcgcctgcaaagaggcaggtgcgatcgaggcgaccggccacaaacttatcctcgtgcctgcagtcgacggcaagatgacgcccaccaatctccaaaaggcgctccagcaaaatcaattctaccctcacatggccaagccccggctactttatatctccaatgcctcagagagtggcactgtctacacgaaacgcgagcttggcagcctctccgcgatttgcaagcaatcaaatatcctgctcttcatggacggagcacgaatcggctcagcaatttgctcaaagaagaacgatctcactctacgggagatcttcgacatgaccgatatcttctggattggtggcaccaaagctggcgccctgatgggagaagcagtcgtcctcaagaaggagctagctgatggcttcgatttccacctcaaacagcatggcgctttgctagccaagggccgtattttcggagttcaattcatggagctcttccgatcagacttattcttcacactagccacgcatgccaatgagatggcccagaagatctcaaacagcttcaagaagttgggttataagttggctgcggagacagaaacaaaccaggtgtttgttgtcattcctcaggaattagttgaaagactgcatgagaaattccgattctatgtttgggagcagcttgatgatgggaactccgtgattcggcttgtgacctcctgggccacggatgagctggaaattgataagttcaatgcgtgggtgcaacagtggacagtggaaacctccagttgaagtaatccgccgtccattaaatgctgccgacaggattcgttacatatttcgttatcactatagaggtaccccatattaacataatacccgactcaataaaaccatcaatttcaacctattcacctacagtatctgcgataaacttgtatcatataggttcctaagatcccgctctatcctcccgactagcaaggacatgaatgcgctaggccttctcgactcgaatgatctacgttctcacaacaagctaggaggtgtcactgatttctaagaagtcgatagtcccaccgtgagcttccattcattacaagctatgctgttcggtgccggggcgcatatgtttcatccaggctacgcatggctggtttccagcgcagacatacagcgcccatcacggctgcagaagacagggccactgccacgtagaaagtatgggtcaatgccttattgtatgctttcagcaccgtgccatattgatccgagggtatatggtcacttatttctgttgcacccatgctcaagacggcctgagcatctattccatcgacctcttccgccagatacctcaccaactcattggtgaacacattctgagcaactgaaaccatgatgctacccataaggttctggcagaacatgatgatcgctgtgccaatggcaatatccgcgacgggtagagcctgggcagttgtcagagcagtttggattcctaatcccgaccccgcaccgaagaggatctggtatcctatccatttacctgcccctgtatgtacctccagtgtacttaggagacctgatcctgtggcgatcaagataacagaaaggcaggcgaagggagcgtgacagcccgccagagaggtgagcgcaccgcccgaggtggaaaatatcacgaagctaataattgtgggcaatgtcatgatacccgagcgtaccggggatgcacctttgattgcttggaaccagatggggagctattgttcgcatcgttagcggcgcgggtcaatgaagaattggcgatacttacgtagtacatcagtgtgaaaaacgcagcgacgatacacgatccgtacattgatgagccccagatattcctattttggaccacccgcatggggactgtgacatgggactgcactttggtgaacacttggatagaagcgaaggcgagaaggagaactggtccaagaactaggagagtaatgatacgtccgctcgaccaggcgtattttgtcccaccccactgtagagctagaagcaagcatataacaccagggagaagtaatgatacccctggaaggtccatctggcgaatcttttctttcatggacgactgagagaatagttgcggttggtcaatatcggcattgggggcgttctttataggtcgaatacaaaggaatatcaccaaggccacgaaaagccccaacggaaggttgatatagaagcaccaccgccatgtcaattgcgtattagttgtgaaggcgccgcctacgagaggacctgcgatggagccaacgccaaatgccgcgctgacaatccccaccatggaagcgcgatgtctaagagggactcggtgggcaaccagcacgaaagatcctgcgctaacacctccactaccagcaccggcaattgcgcgaccgacaatgaatgcggttgaggatggagcgacgccgcaaagcaatgatcccacttcaaagataaacaaggcagccagataaaccgacttggcggaccagaatgagtacagcttgccccagatgagttggattgcgcaaaaggtcaacatgtaagcgcttgcataccaacccacatcgtctagagcatgaaaccggttggtgatttcaggtattgccgtcgacacaattgtactatccaagccgagtagaaacatggacagtgcgagagagaacaccaccagtgatattgcgatccagctggaagtgcaaattgcggcactggattggtctgcttcaggaacatattcttccctatcgactgtaattgatgtcttgctctgcttttcggggtctgctggatgaccatcattggaggtgttgatgaccatgatctgctatgtaggttggttattgctgtctttccttttctttccgacagaacaatccccacgctggtagttacaataattatgaactgaatcgagcctaaaaggggttaggaactttgcatgcacagtctttgttagctaagctattacccaggggcctgtttccagggttccgaaggccaggtcaactccaggggcaaggggcaaagggaaaggtaaatggcgacgtattgcagtcgatcatcgtgattggtcgagtcaatctcatctaatgggaataaagccatatgcaagggacggcatcttctatcctctcctcagatctgtttaggctgaacgggtcgacattcctccttgcagcgtcacgggaacactggaatgtgtgatttggacctactaagcgcgctctattttagcggctgcaagtagacaaggcaaataaaaactatcatggcaattgaaccgcactgaacagtcttctagaagatctggcactgttttttgtctgttttcagtcaactattttggaatacacaagatatgcctcaacgtccatttcatactcggaggctccggttaccgtttatacatgtaccctgcccagacaaaggtcgaagcgtttggtgatacggcacacactaggatccgtttttccagatggagacggtagcacagccaagttcctccaagatgaatccgtttcgactggatagaacccatctaccggatctagtctggtctcgccccgaatatcgtgttgactaggcccgaagatgtcaagacagcgtaccgtgattcttggcagtctcgcagggcgcaaaatacaaactccagctagcttctcggggcgctgatgggtttgggctttcttagtcaagaggatggaagaaggcccatgaggattccagttgggggaaaaacagggagcagtaccatccgcaattttctcgaagaatccacgagtgcgtcccggtaccggctgtagcgatatggccttggccctcgtcaatgcatggcgcagcatgttgtagatgttattctcaaagtgctgctatctaccgctttcacccctgccgcgccataccgccttataccgcttttgtggtaaatagtagcaagacagtagatgcctgcaatttgtatgtaaattcctaatagaattaagtcacttttgtcataaactgcttcatcaactgtctcattaaaattctgcaaatttataccccatagatccaagtcagctgatcgcgctaaccatattcggatactaagatatccgcgtaactcttgcttcttcggacgtccaactgttcgattaatcgatacaaatgattgaattggtacaattggactcctatattgatccgatggcttaattctttcttaatatgtcacatggtacttgacagccagttcttttcaccacagcccactccgctcttccccgtatgtacactcgatgaggctgtcaatatcgtgtgatgcttgtcggtaagcttctatcgatcttatgcgtatcatatcatctaatctttcatgtagtcaggcaaaagtcaaatgtcttcatgaagggcaaccgccctgtcaacgttgcttgaagaacaaaaaccaagaatgcgatttgacagatccccgtgcctcaaaacagaggacacggggaaatatcgtctcatccaggaccccaagaaaacgaaaagcattgtctgccctatctccaatgatagaagatgcagaaagaagcacccctaggaatgtcaccgtggctcaagacctatccaaagatcccatagcagcgctatcgccagcaaccatcatcagcgcagtggaaacctacagaaaaaagttcccaattaccaattttcttcattacccgtctttgatctctgacatatcatccaacgttcactcggtggactccgtctttgtcgcctcggtcctttccttatgcgtgcggtttatgaacagcgatgaactcgaggaagaagaaacctatgccgactatgcacgcaagaacctggcccagcgcgtgcttgaagccccctcgctttatcttgcccagtccctcgtgatgatctcattttatgagtggggcactgggcgaccttatcaagcttggatgtatagcggtacgtatcgaatcgtcaactgatcgtagagcattagctgacgagcagcaggcatggcgacatatatgatacaatcccttctgaagatggcagatgatagcatggaacacaatcctcaagagtttcatgcatcccaaacacaatacgaacaactggtccgaacctactggtgctgctttgcccaagactgcgagctgagctccggggcccgtcagcactttgcgctatcattctctcagatctcggtccctctcccaatcagtgatcgggacttcacatttaatcatactccagccaacaggctgatgcctgctgatatgaataaagactgtctgctagcgaagaatcttacgattgagcatggcctgacaattgtcactcgagggttcgacatattcgtacgaatcctaagatttgctaatgaacatcgacgagcactggcttctttgtcttcagatgactcggctacatctccgctcctcttgacttggcaagtcctcaagaaggaattggatgaatggaggtttcttcaggatgtaacggttcagttcccagctaccagtgttcaatcgcacgtagcactcgggtacggggagctgtttgcatacatcaatctggttcattgcatgaggtattcgtttctgtttgcgcattacaggccgggatactaactatatctcctccagcatcctttttctccatcgggaccgcttcttatccaacctaaagccccattccgacgttttccatgacgcaaatgatgatacccaaggcgagcccgatacaatcaaacagctattcgaagccgctcagcagatcggaggtatcctcaatgcactagacgcctccggcgcacctataatgtcaccatattccggcttcagcgtctttgtcgctgctcatatcaacatgtacggaacaattgccccacagcgatatccgggtggtctcaaacgggccgaagaagaaaagagtcgaaatcttgactatctcgagcgactaagtaaactctggccggttggtcgcagttgggtgagtattgaaaagaaatctctaaccgaatatcacagctaacaataatcagtggcgaacagtacaagaggcaaaccgattctacgaaatagtcaagagtaaccaatcccactccgagtctggaatgcacagccctaggagattcgccctcgcaggtaccctggatgaatatggcgacatccgatctcgtccaagtagagacgcgtatgcgaccagggcgcgaacctctgaatcccgtgatacgcacagttctcatacttgtggaggcacttcatcgtcgcctgctcttggtgaaaccaactttcttcccagggagaatgctgccattggtagtcaccatgattttgaaaccgatatgtttcaatggccatttattgatggatcgtggtcccttgggtttgatgcgggattggatgggttgtggtataactcagggttatttgacccaaatccatctcttaggtgatgttgttccttttcgttggggtgtatatgtcgccgtgtgatttccctacgaactcacaagaagaaatccttttcgatatgatgttgtcgattgaaattttaccatcgccgtagatatatatcgccacaatttgtccgctttttgcatttcgaactttctagtaatacaactatctcattcaataaaaatttaaacaaatcttaatctaacattagaaaatgagctccatgtatacaaagctattaccatttgaatattgtgcataggcgggatgtgcgtggatgtatactttggtggacatcgcttataatggcaagatggccatgtcctcacatcagccagccaagtggccgagcagtaactcggccatcgcattcttccttggtctagtggtgatgatttccgcttgtcattaaaaccgataagcgcgggagaccggggttcgattccccgagggagagatttctttttttttttttcggtttagacttgtttcattaagcttacattgaacaatggatgggagcttctattacgcatagaactgacgcatttaggctgacttatgatggccttgcactttatttttgtgttatttttagccactgctttttttacaatgtttccccgttgtagctagaaaatgacagagaatgatggtggtggaacaatatatgaggctgaagttgtcgctggagtaatccaccttatggatccagggctatatctatacggagacggagacatagctcactccagctacgattctaggacagaaagcatctgcagcaaaaagagtccatagataactatctaaacattcaggttaaatgagaccttccttgcgattccctcgagacgcctagcaatgtcattacatttgcattgacacgggtctctgttaagcgccaatgtcatatgaaccaagtcgtgctccatggtaagaaacacattctcgaacttgtaattgccatcatcttcacggcaccaaaaggcagtattgcgacgaataatctcgctatccggggcccgagcaatcatgccgaatgcaatatctatgatccgatctgtgcgaatagacagatccactactgcctgagagacatccccgatgcgttcctttcctcgactatctggatcgcaccgtagaatatgggcttgggcatctaggttagctatgaagatacggcattcgtgcaagagcttgtcttgccaggatgaggatattggtgccatggttttggtgagtatgcgtgatagactcgagtagacgggggagttggagtatttatattaatatgattggggaggatgacctcggacaatgagagaggccattgttcgatttctgattgggaatacaaaggtatacaccctaacaaagacccaatcttgtctttcttccaaggttagcatgggacaaagacgatcatattacctggatatatgcgtacaacaacatagacatgtcgaaaagggtaaagagaaacagaaagaaaattcattagggtaattaatgagtgggtatataatattgagagatcggccgacaactcctagctcctcccgttaagatgtttccacggtctgtgatacaccacggtcttcctgatgccctcctggtcgttgatagactcagactcaccagcctccggggaccagcaaatgaaatcagatggctctggtcaccaaagtttgccaccttatcccagtcagtagcagtacgggaagccggggccgatttcctatcactcaacggatgggtagaggcgccattgtagtatttctgggacgagtggttcttcttgtagtgggacagtaggacattgaggacagtagacaggcgcagatcaatccaacgcctccctcggcattgctagtagaggttaggaaaagaaagaaagcaagaaaaactgaccaaaaggggatggggtacgacatacccggataagatgacacgaacgaacataaggccctcatcgcttgaaccttgcaacaccatgatcaatcggtaaagactgaacccggtggccagcccaccagcgccaagtaggcctaccacgcgcagctttcgattgcgcgacatttgcaaagaccatgtcaatggcaatgggagaataagaatgatgaggtcactgaccacactaatcacggagtcggcgatcagggcagcggtctggtctagacagcttccttcaccacgtcaccgagccagtatctgggaatgggagcacagatgcgaatcttgacgatcagagcaacggtgtagtagcagcataagcaggcgaggaagatatagataaaccagactttgctgcggaagggggcgaagatgcgggtgagaattgctaggagggcgattttgacgaagagcgccatcggacagtagagaatagtcgcaatatagcagaactttttgaatgcgattagctcgtgagggctaatatcactaagttcgtatcctcctccatgttggccaactagtagagtaagtatgtaactgggaaaacgtgggaagtatagcgcctaccgacgatggatattgcacaatatcccataaacagaagctgcgtacagtcagtcctggccaataaggcactagattatttgctcaacttacccaagcaatggtacaggcaactgagggagtgatcagtaggattgcagtatatgtatagagggagaaactcacggtcttcaactcctagaggatgcttgaatcgaaaccgagtataaaatcgcaagattacgaagatcgtcacgattggaatgcagagacattgtgtaacaagattgacagtatgcaagacatccgttgggttctcgacagtcatgatgggcttgaagttgaagtccccctccccttacaataaaagtaccggggaattcacaagataaagaacttcacatcgtggaaatgaggattgacagaaagacgatccttagcggggacttcaaagctatcgaaccactgctatgtatacttcgtagtggcgcgggatccatgacggtgataattgctcaaggggctgccttagacccaccacttggctcagttgatttctgaatggttcatgaaggatttccatcaataacgctaaatagcgctagactccgtttatactccaccagcatgtaccgacggcatgggtgccagccacccgggcaaataccatagtgttcaaaaagtctgttcccactgccccacttgctatccccctaacaaccatcgtggttttttttcttcttcctacacaccccccaatgacattgccggtgccacccagtcaaagctagcactcgattttaggtactcccgccgaacgatttacaatactttgaaacggttcaaagaacacaatactgttaaatctctcccttgaaccggtcgcccaaggatctttagtgatcgaactcgccatttactttttatactcgcccgccggcaccccttttggtcctataaaacgctgagttgtgctatacctggtcatccatcccgctctactattattaacgttttaaggctaaccggtcttctaaaatataggacaaaaaggaagattctaatcggaaaggaattagctcgacgacgatatcgttttattcaaaaatagcgctctgagtggtctagaaataacgtttaaaactaggtcttctcggatgagtattctgtacaacgaataacaaactgcagaccacaatggtgttggcgctttcggtcggagggctatagaaaagatcttataaatgctaaggtatacattaaagatatttcacaaatggtttagggtacaatctggttaagaagtcgattagagttgattattataaggcgggagaatattattaacccggaatcgaagaagacaggatatactactatttcctatatagatactctcgaagaaggtctacttccattctatcgaccctactctatcttttagtaagataacactcggatccatactactaaaatcacacaggaatggtttaaaactcacgggatatatatagaggagtagctgccgcactcactagatttaaacccgattgaacctatatagcggtggctaaaggttaaactttttgagttatttcctaagctaatatatataggaaggtctgaggaggattagatagtattcaaaaggtatataaagatagcataggatgctattccgcagtcgaagattgattcattgattttaagtatagggcgcagatatatggcagtacagaaagcaaaggggtattatacaaaatattaaatttaaattttacccgagattggcatagggttcaaccctatttaattcgaagtaaattgagtaaagtatggtagtgctatgcatagatatgtagagatatatatttcaatgttcatgggtgaaaatgcgggtgggaacagacttattaaaccccactgtagtatcgattctagtgcctcgtatttccccgatgcagaatttgcacagcggttcgccaccaacaccgttgttttaccagtcaaataaatgggccttagttgaaccctatattggctagccgaggcactttggcagctgtgacagctacgatgtcttgggttaaagatcgacattgggccgaaaaaggagtcgcatgtgtgtttttctccttttctttctataattccgtctgtcctctataattcattccatagtaaagcgacatagaacagaaaagaacaaacatgaccgtccactacctgagcggcaaagactcggatcttttcaaaccactgacgatctccaatggaaacatcaccctcgaacatcgtgtcgtccatgcgcctctgacccgcaaccgcggagagccattgaatcccaccaacaccccggaccaccccaatcgtatttggatacccggcgatgcaattgtggagtattattcccagcgcgctaccaaaggtggtctgataatctcggaagggatccccccatcgctcgaggtaagtaagcatcggacccgatttgatggcataaaccggattattatgtgattccggcattgcacgcttaatgacattatccaaactttaattccaattatttttaactccgtttccacagagcaatgggatgcccggtgtacccggccttttcaactccgaacaagccgcgggctggaagcgagtcgtggatgccgttcatgcgaaggggggcattatcttttgccagctgtggcacgccggccgggccacgatccctcagatgactgggtcgcccgcagtctgcccgtcggcctctgtgtgggattcgccgacggaatgttattcgcatccgcccgtcggctccacccagcccgtgccctacgccaatcacccgcccatcgcaatgactgtggaacacatcaaacagactatcgaagattattgccttgccgctaagactgctatggatattggcttcgatggcgtcgagatccacggcggaaatggttatcttccggagcagttcttgagctcgaacatcaacaagcgcggggatgcttacggcggtaccccggagaagcgctgtcagtttgtgtttgagttgatggagcaggtggccaagaccattggcgagcagaatctggctattagactgtcgccgtttggaatgttcaatcaagcacgcggagaacagcgtgttgagacttggactcacctatgcgagggtctgaagaagaccctcccgtcgctgtcgtatgtcagctttattgagccggtatgttttgtttgtctctatctaatgacatactgctaacccgcccagcgttttgaacaaatcttcggggccgaagagaaggataagttcctcaaaagctggggcctgctgggcgtgaccctggatcgtttccgccagatctttggctccactccgttcttctccgccggtggatgggatgatcaaaactcctggggagtagtggaatcgggtaaatacgatgcgttgttgtatggtcgatactttaccagcaacccagatctggtgtacagactgaaggaaaagctccccatggctccatatgaccgaactcggttctatggaccatttgaggacaataccttccattacacggattaccctactgtggatcaacattaagtgtttcatagagtaaatatagatgttacctaggcagatagatatgtgaaacttggattttaagcataagaataaccgtggaaattctcagccttcaccccgaaaccgagtctagaccaagcccgaccgtaagcgacctatggtttaaatgaatgtggaattccgggagtcagccctaatgcaagacacggcaatatcggcaacattgtgcctcgtgggaatcatttgtaatacggagtacatcgttatgctcggacattagtgatcgactgccgtgatgaagatcgtccccaaacgggctgcaggctgcagctgcactctaccgaggagactgcaaaaacctgacgggagagaaaatcctaaagttgtctcgacattctctaaatttgggttcggcagagtatcagtcgctgttatattgctcatctcgaattacgagctcaaggcccacttataatgacttgatgcttttggccgggaccatactggcaaagatcacccacttcacccgtgcgccttaactagagggaaacggtttgtattacatactcaccaacggcaaggcacagccaaaaaaggaaaaaaagtgggaagcaagcgataatctggagtttgtatcgcacagcttcccttttagtgctagccgatgccaatagccgacgccaaggcgatggcactatgttgtactatatcttcctacattaagcgaacctgcgggccggatagatgtgaaaatgctgcgggaaaaccccatgagccctgaaaatgccgtatggaattttgggcaggaattcgaactgtaagcgctatgaaaaggataccagtgaatgcgtaaatgcggtacgtagtcaggacttacttatagcggtacccgaagcgccccgaagcgccccgaagcctatccgttgataaagaggctaataatctctccacagtatgcaccagcttgccactatcaaaggttatacatagaaaaggtcggttccaaaaattcaggcttttcccgccttttcccgcctttttccgctgtctagaaaactaagaagacatcgagaattgtttttaagaccaaaaagactagcatataactagccaattgttcttgtatgtgataatgctatcagtaatattttattgggagaaagcaattgggagactggctccacgcactgcttcttgataggagtctgacgtcaattggcgcgcgtaaccgactatcatgtagataacagctacattgaggtgatgtatacacttttgcacacgactacatgattatttgacactagaggcacaatacttcgccaccccaatcagcaatcaacgtacagtcactatatgcaatgaccgtcgcaaacgaggagataggcatttcctgcgaggaactatgatgattgtgagcattgggcgttcctcattcctataaagtttagtagaactctcttttgaaatctctttgacgtcctacaggtctctcttgctcattttgcagagatgcttctcccagtttccagagcaggagggatctttgtctttgtccgcatcaagctatttagaaagcttcatggcagtagttagatcatcattgatgtggatcgaggagaagagcaaacaataaaatgaactgtattatgctaactgagtgtgtgtatatgtgtagacaaaaagaaggagagaaaggaagatatggtagtcctgataaacagggtcaggtgacgtgatcccaataatcaatctataagattgattgattattgttgtcactcttctctgcagacacatatcagattgcgatcagtacaacttacaaaccaagcccgtcttacgataatatgaagtgcactttcttctaatcttccaagctgcaggtctcctatcctaggataaactcatggcgtaagaaaacccctttcacattgtagcatcgactctctttgtttgtactgctagattaaaaggaagaacagacatgctcatattctcactgcagaataagaccaggtcaacaggaccagtatgaaagaaagaagcacctccgtttgatccatctgactttacccatagtaaaccccctcctcaactgggtcaggaatgtcccctggccatctgctattgacgctctccatcgccagctcgatctcatcctcgtcagagaacacaccgtatatgtcgaaaagttgaagctgatcatgaacccagatgcgactatcctcagcaaaattatcaatctcaaatttgtgccggttgttcacaacaatcatgtcgtagatatctcccactgtgtatccggggtgcacgctcagagtcaagatcaattcccgctcgggtggaaccaaggtcgctcgtctttcaaacgaaatgatggctttggagccatcgtcaagaatcgtgctgtcttgtgagaagcttggaccacaattcagtctgatcgccgtcatgttcacttccgatgtcgacagaaaaaaggtccagcgatttgcggaattgggatcgagaggtggcaggcatatggctcgaatgcaatcgagaggctcgttcaggatctcatctcgctccgaaagaggtttgaactcgattgggtcccattccataggaaagtctagttctgttagatctttttgttaacatatatggtgatgggttgacatactctggaagaactcattgatcagcatgttgggtactggccacaagggtagagagagaagggaaaacaattctgaaggcttcagccatggcagagatggctagagagatggtaagacatttcgcgttaaaacaatcatgagaatggtccggaccaccttattcatgctaatttatgttctattctgtctagttgacctctcttattaggtcagccctattctatattcaacctctttctctcttgcacaatattcataacttttatcgtccatgaagacgtatacaacgaaataagcatgcaaaaatctcgatggttccaacttccagaacacatacttggtcgctacttattgtatatagcagaagtggcaggagagatggttgcgaaggggtagagcgaccaaaggtcgcctgaatacttggctatgggccttcatgtgaactaaagttccagaggagaagctagaccagtcgccactcacagaatgaaaaaggaatttataggatgttgttgcattaggaggcaaggatgtctactacggtctgtgtgatccctgtgtttgctagctgactgtcctagatggttggtgttgttgtgtcgctctcgtcttgtctgctaggccagactgcccatcgtgtatatccctcttcaatagtttgataatctattatatgattacgaacgccttctttcacggtaagcctgatgcttgatactatataatttccaggttatttacatagttcgaagataaagggcaaagaaatgtagtattgtccaaatcttattgcaatatattcctaggatgtctgctggcagatcaaggctaacgaattgcctaacaatctcggtgattcgatcaacgggagtccattacagatttggcaatggatcgtaaacaagacggtaacaattcaagatgaaactccttatcgggtgccatcataaggttcgccttaggctagctaggggtgcaaatttcttttggtcggtaaaagagccgaatacatagaagttacagagtataggtacatgtatatgctcctaaggaatggctgttatagaatatcgtttctcatagtcatattaacgcagtctaaacactgctgtcggtgataattatacaggacttagcaaatctactcgtcatcactttcctccccttcaatcccggaaacctcgtcttctgaacaaggttggaaaaccccaggggccaaaattgatggccgcgccttgatatttcgagcacaaactcccagcagaaggtcatcatcatccgaccgactcctcgtagccccgtccagcacgaatttgtattcgtggcccatctcttctacgagggccaacagcatgttgcgcgggagatatctccccgcagttccccagaatagctttccctcctctgcctggaggattgcagccgcctggctggacttcccttggctactatgctgccagcacatgcgtagcatctggacgcagtagtggaagtacaaatatcgagcagcagggcgaaagctcgaacggaacttgagctggcggccgtccagctctccgaatgtgatagggtgatgtcgggagaccttctcatccctcctctcccagtccgggtcaataagcttgactcggtactcccgaggctcacagttgagccaacccttcacggatgctaggacatgcttctgagcttcaggaatatccggtactatagcaaatttgccagcatcgaagtatctttcaagccttctagacagaagaaggccatttcgaggcgaggaaagctcctccggtcgcgtcttaccgaagatagcatccatcgtatcctgcccattcatatatgggaacaggtgggatgcttgtatgttttcttcttcgtcaaaatcacccagaatggggcaccaaatccatggctgcgtagagtggcgggcgtcataagccttgatcatgcctgtccgaaagttggcttgttggctggtgtcgcaattcccattgcctgtgcctttgatggcaatacccatggtagaggtagtgaagagtttcataaaggatgcccttaagctccgacgaggtagcacattctccaactggctaaccctattctcgcagattttccgagtctgcgcctgggcttgaatccgttctaatatcattttggcctcgtctgtcttcttccattcttcttctaagcccccgaaactaccaagtgaaatcttacgatccacttctgacctttccaaattgattctttcaatctttacagcttgactccagagctttaagtcaaatgacccatgtgccctccatggtttccgggctatactcaaattggttgtgagttcgcgctttcttttctttagaatacgtatagtttcaggctcggtctggagggagtccattgattcattcaagaaatccataatgatggctagaatcaagtttgtgtctgcggatttgaagttgcggtttggagattcaggcttggagttcggagattcaggtttggaatttggagattcgggtttgcagcttggagattcaggctgagagcttggagtctcatgtttggagcgcgggaaggtactaagcctagtatagctgtgattgtgtcatgatgatatatggtcccgccgtttcactttatggcagattatattaacgcgctaaattagcgcttctaaataactataagaatgaacccaattctttaaccttcatggccatgcccaataaaggatgccctcaagctgcgaggtgccacattctccaactgaacggcagggtttagatgccattgcgccaactcgaaaaataattagggattgttggctctgactacctacctgccttcaaacagttgatgaagcttgacgatgaagcagttgatgaagcagttgaagcagttgatgaagcagttgatgaagtttgacgatatagttgacgatgaagttcatgagggaagcaattgataatgattcactcatttgctaaaaaggacttaattttgctaggatagtagtatggcagtaggtacctacaatttgtatgtaaaccactaataaaattatgagtaccgtctcatactagtttgacaccaaagcggtgtatagaattgtaaggcagtatcgaaagcggtaactaactagcaggtactatgactgaattttcaggcacaaggctaggccggtttgagaataggtaagaccaaggcggtaaagaaattatatgggttggcgcgatggcatcactcggcagattttcttactgggcatgaatccgttccaatatcatttaatgagtattccacaacttgtttctatccatttttattgaaataattcattctctacatgacctcaattatctacgtttgatgtttccctcttagtgcctcggccacctttctcaataacccattgtttacttttttatacgatattgggtgattagcctaggactctcacatatacttgattttcaatagggtactcggctgaaatactgtgatattgctgcccttcatacatccaagactaattggatattttatttgcctaatattgccaccgtagatacatcgatcaccacctaggaccatgatccatgatctggagttgacttgacctacttcctagttcagcaatccgtgagacctaatctgaacatcctccaaggcttctaatttctaaaatcggtactctccaagagtcttaacttagaatcaccaagatcatgtttcctttgaacgtaatgttgaggctctgctacttgtagataaaaggaagcttttctttgtcttccttgtgtcttctcatgtctcactggagtcgggaaaattccgagaatatcgagtagactatgtaaactcggacaagtaaacaaagaaaaatttacatcgtctctgttgttctgctctccaggatgcacgtgttgttctgcagacgagacgaggcacgttaccatatgatctgtcttcgcagtccttctcagccccggagatcttcttctcctttttcttttccccttctttcaaattgcctgcaatggatctcgttccaagtgcctttgtggcacgtccgttgaagattgtggttatcggtgctgggtaagggcatagtgaactcgcgataattacttctaacaaattgttttagtatttcgggaatccaattcgcacatgatacgagtatatccttgtcaggtgtcgatctcgaaatctatgacagaaatccttctctcggaggtacatggtatgagaatcggtatcccgggtacgattatattcctacgagctttataatcagatgaatgagttcactaattgccggtgatagatgcacatgcgacgtgccttcccacacataccagttcaattgggcgccaaatccatcatggtcgtcgctttatcctccagctcccgagattcaccaatacctcgaggatgtggtcgacaggcacaatctccgccattttatgaccttcaacaccaaatgtgtcttggcgcggtggaacgaagactcctcgaaatggaaagttgttctctgcaacgtggattccggtgaagaaacgaccatatttgctgatgtctttgtctatgctgtcgggcggttgaacaactacaagttccccaagattgcgggccaggaaatctttcaaggagttcaagtacacactgcaaactggccagctgatatgactgtcaaagacaagcgggtgatcgtgattgggaatggtgcaagcgctgttcaatgcgtggcagctttgcagccaggtgagtcgcaaagtccccccgaagacacacacaccacgctaactgggctcaagttgtttcgcaaataatcaacattgcgcgaggcccaacgtggattcttccacatgcattagcagaagatggcatcgtccagcgcgaatgtgagtatgaaagcaaaggacgagcgacagaagggctgatccatatctagactcaaccgaacagaaacaagcgctccaggcttgccctatgcgctactatgactttcgcatcgcattagagcagagacttgccggaactttcatgggactctggagaggaaccagatctcaagctaactttacatcactggcaaattcattcatggagtccaagatcacaagccccgatcttttaaacgcactcctgccagaattcgaagccggctgccgtcgcttcacgcccggtggtcactacctggatgcgttacaaaagccaaatgccgtgtacgtgcgtgactcaatcaataagctgaccgagaatagccttatcactgaatcgggaggagagtacaagtgcgacatattggtatacgccaccggattcgagccctatcagccacggttcccagtcactggccgtgatggacgatcgctgagtgaagactggaatcgtgagggaccgtgcgagagttacatggctgcgatggttgcggagtttcctaacttcttcggtaagaatctgaatgctttttgttgatgactgtgcttaaatatctcggacagtcttcaaccccccaatttgccctgtgaatggatccgccatccccggtatcgagagagcaagcgactacatgattcggatcatatcccgactccagacagacagactgcgatccgtgtctgtgacccagggagctcagcgtgcattcaaccaatgggttcagtcgagaatgcctcacatggtctggtcaggaccgtgcaaatcatggtgtaagtaaatatctctatcccttgttcctagatttgtagatttactcatcttgtgatacagacaagaacgataatggaaaggtggttgttccctggcccggcactgtcctccactactatgcggcaaccgaaattatccgctgggaagacttcgatctagtgtacgagaaccccgatgagaaatatgcgagtttcggcaatggtgtgactgttgatggatttgtgcccgatcatttcccttgggttcatccacccactgagtttcaaaagccggaaaggaatgcggagccaacttctcaggttcttgcaccgcaaagcagtatgttgtatcgagttacaagccagattttacagttgctgggggcatggccgcatcctggtgaaccaccagtcaagagttgaggaatgttactatgctagctagcttttgtgaaaaatccaatatgttttcgggttaaacgatctaagtgtatgcttagtattaaaacctgaattcgtgctacacttctaaataattataaagttacgctaggtctagtcgtataaaatgcatgaattgactctattttatagatcttatatccaatgatctagaccaatcagcatgaaggtggatatatcagtaattccatcggctataacgcctttacgcttgttatccccggcagatgcgcttagattattaatgagctcttgaccgatttatttaaatagtctaaaggagtttcgttctgtttcttctttgttccactaatcataattcattgtgaaacaattggtgagttcccttgtcctgatgatatgacgtcatattcaatgtgatattcaatgcaaaccaacaagaataaataaacaattccaactaatgataatctctgtattagaactcatatacatacgcccgcaatatcacaatggctgataataagatggaatatgtccggtacagacccctgtcccacacattccagtcgaatgagatgctgatatcaaacaaacagcctcggaaactcaggtctcaagatctccaagatcatccttgggacaatgggctatggcagcaagcaatggcaagactgggtccttaatgaggaagactctctgcccctgatcgaacatgcctacaagcagggcatcaacacctgggacacggtaattgaaaacatcagaatatcttcgagaaaaccaccgaataagccactaatattcaccgtgtaggcggacatctactctcacggcaaatccgaggaaatcgtcggcaaagccctgaagaagtacaacatccctcgcaaccgcgtggtaattctaaccaagtgcttcttcggcgttgacgacgagggcaagttcccacccatcgccgcatccggcaaaaacgacggtcccttcgtcaaccgcaccggcttatcgcgcaagcatatcttcgacgccgtcgacgccagcgtggaacgtctaggcacgtacatcgatgtgctgcagatccaccgattggaccgtgatactccgcgcgaggagatcatgaaggcgctgaacgacgttgtcgagagcgggaaggttcggtacatcggtgctagttcggtaagtccatcctaccttccttccttctgttcttattctcccctttcgttccttccgttttatgatccaattgatctccactaacccataacaataacagatggcagcatgggaattccaatccctgcaaaatatcgctgagcgcaacggctggcacaaattcatcagcatgcagaacttccacaacctcctcttccgcgaggaagagcgcgagatgatcccctactgccgagactccggcgtcggcattatcccgtggtcaccgattgcccgtggtgcgctggcgcggccttggggctcgcgctcgacggtgcgcgagaacaccgacggcgcgctgaagatggttgtccgcagtcgcgagtcggaggcggataaggctatcattgatcgggttgaggaacttgctaagaaaaagggcgtgagcatggctcagattgctattgcttggtctttgacgcacccgggtgagaatccgattcttggtctgcatagtgttgagcggattgatgaggcggttgctgctattaaggtccggctgtctccggaggagattaagtatttggaggagccgtatgttcctaaggctgtttctgctcttgagcggtagggatgtgaagggaatatatacggagttttagaaggtctgtaaatactgtgaataccatacaatttagaggcatcttgatattctacaataacagcactgagcttttgatgttgaatggtacctaggcatatagcagttctacgaggcattagacatctcttttatctacgatatacggagtatgcaaagagaaatatcctccgtatatgtcagatctaggcatcaagatattctgtagtacttcggttgtttcggaagtattctccctttctgagatcacatttcggcacccctacggggtaagcatccactcgaacacccactcgaaacatccactggctcagccacacatttccgacaaatcaccctttacgaagtgggaagtatacacctcataagccaccaccttggcaaaggctagctggtattcatcatatttggacaagcgcatgcagatcgcattattattaccttggcgaacgctaattcgatcgagatagtagataacggcgtggcttagcgcccaacacaggatgatccctccccgatcttctctagcgctttatgacctgggagatgcagatggacgttactccgaggacgccggtctcatgtattgtagcaagaggataggctgtaacgaattgacagaaaacagaactaatacatccttaacttgggttcctaatgagattagcaagatattttgagtctatacttaaaatagaaaggcttgtggaattcacagtgagtgatgggtattatattcatatgtagcgtgattggatagatgagtagcaatgtgcacaagtgagataagcatacatattttgacctcatgatatgaagatatgctaagaagtaggtagaaaaagagaagatagagggttacgcaaaaagcaaaggatgctagatgctagttggaatgtgtgtgagagagggagagagggagggagagagggaactagaagaaaaacaaaccggcaaggattcgtaccagacgaaccacactgctacgtatgaacgcccaactgatgccaattgagatgagactcgaaagaggggctatgatgatgtctacatgtagactagccacaaatatgatgcaggggtatagatggtgatgggaaatggaaaggtcaatgagtatcgtgttttcggtggaaaatgccaaagaatgtactcaggcggcggctgagtttgcttttggtcgagtcgacagctccagggagcggagcatccgacttcttcttgcgggtgctattatggtgcatgaggtgggaatttgaggcaggcggatctcgatctggccgcggttttgatcgaacggtttctctttccggctgggctttttcgggggacttcgctctaggataaacagctcgagaagaatcttccacctcagcggacggtgggcgaggagaagggggacgggagacaacgatatcgcggccattctcgccggaggtagtgaacatgctgtgtcggttcagacgagtactcagcccagaagcggatcgtcgtttcgctcgatccatgaatgcagcaccggtggagttggagcgcctggacaaactacctccatccataatttgggaacggcggacactggaaactgacaagcagcgcttgccatcttcagcgacattcgggaaagagtcggtttcattcttggaggtcgtcggggatgcatacttggcggatgtcggagacgtactcgactttgcgggcgaagacaccgggtcactgtagcggaaattgtctgaccacccctcacggaaggcaacccagatgccggtgacgacaatcaaagttcgtagtccatcgtcaagaatgactgagctgccatcgaggggagtctcgtccgaagcatcactcacgaccgacattcctgagcttggagtcgtggggccggtgccagaccgaacagccgtggaatattcattattgacttctaactgatttcgagtcatggacgcgagcacgggatgtcggcgggtggtaggatcgatgacactgaaggtgaagcgcttgccgtcctcgcgcgattgtgtcgctgtgggcatagtcatccggcgattcctcccaccacgcaaagcccaccgcacgacttgcacgccgctatctgtctgagcgacaaactcgtaagacccgcttgggagaggcgcggcctcccagatcggcccgaagttcaagcatatctccgcctttccattcatgcgagcatctccttgatatttttgacagacagtagcgacgacttcgcgatgatcttcgtcctcatcctccgagctgacacgtttctcaggaatgctgtccaccgcccggtcgtattgttcactcaacaccacgatgaggtcatatggacccaatccgtttcttgttcgatagatggctgggaatttgcgggccagtagcgggaggtaagacgtcgatggcagaatgtccacgactggtaggggccgaggggtttgcgacacctgttgtagttgtaggaggagtttaggacggaatctgaatcgcttgtggcgggcatgagcggcggggtgggcgaattgatacaatgttttgggtcgagacttccgacctgtgtttgaacgggcaactcgaggcctggcgaccatggctgattctctggagggttcgcccgagtccgaggctgactcaatcgaatccatcgtcatagcggatacaaggcccggacaatcagtagaaccatcaggcagcctaggagggctgtaaaaggagttcaacaatggtagagcagacagtaagaacgcaggcgagtatgtagtacacgtggaaggcttggcttctggtttcttaggttcattggcatgggcagctgcggcatccgctgtgaggccaagattcaacagcatgtctaagccctagcagagccacattggaatgagagaaccagatctctatggaatttcaccccgatccgatgtactagtcataaacgggccgtattcaaacgcgtcagctgcgggggtgggaagttcagccccggagctatgtgtggggaagggcttatgacgaggtaaaatggaacagatgtagagaccagaatgtgcaagagaaagtatatgcaagggcagttaaaagatttcaagaggaggaatgttactgcaggagcaataaaggacaaaagatgctcagtctgaatggggcggtcagccttatgaagctatgtaagaaaaaaaaaaagaaaaaaagaccgaaaggaactagtcaatagaaatgtcgtagtggaacgccatttagttgcacaaaatcccagaattgaccccccagtgtgtaatttatgtttaataaacaaattataactagtctatatcaaagtactcctccgtactagcagaaatcgcagtacggagtagtttaatgcacaaaaccggaagttcagctcctgtcagcgggctcggtcatatacggcctccgactcaccggattccgtggcgatcatcaatccctacttagtatccagtcaggttctttttggcctaagatcgggatggtctgcccctcttggcaagccccatctcattgaaaaatcggcagattggtccgaggctggttacctcatgagcccatactagggagagctccatatatttttctaggcatggtgggactatcacgttcagaagttgaattttcttggggatgactttgagggatttcatatctacggagtatgaaatccgttgatgacccgttctcaatttaaccttggaatcgggcaaattgttgtggcgcaaagtccgatgaactagcgcttatgctggtagctcagccttgggaataacggaaattcttggcagattgctatttacgatatgtacggagcacgacgggtagctacgtcgtttattgattctgtgttgatcatttgtttcacatatctaaaatgcccgcaagatgaaatttgcgagatgtccccaaatcgccacgggaatagagtccatacctcgctgtgtctagcaggttctcgcaaggacgtctcttttcatcaaaccttgacgcccggtggatcggatgactaattatgcacagttatgcagccgaatatttcagcgtccacctcttgggaaggtcgtaaggttacctcggtagatcggtcgaccacaacccggtgaatcgtgaggtaaacatcccgaaatctagaccgctaggcatcccccattggaagaactcccgaggtctcatttaagtcacccgcttagtggctggggtcactggaaacttcttatggctccagttcaacctaccgcaaggccaccgccgttgtttgccacactgctacgattggacaacccgattcgaagtttgacgctagcattttgggcatggaaggttctgttgtatatcgttgttgttgcctgtccaggatcaggttatgatacctccacctccttgatctcatatgctgccaatccaacggcccagtccgagtctctctccggaccccttaaatttgccagatgggacagtatctacttcctagatattgccgaaaagggatacctgtacgagcaagaatgggcttttggctggggctacactaagcttctgtctatttttgttgcaggtacacaattccatctagcactctagcatcttctcacactaatacaggaaataggtattcgtctctctggcggagatgctggacccgctagcactgccatggtgggagtggttctctcccatgtcgcccattatttgtccgtattggcgctctatcgtctgtcggccaatatctttggccatgcgactgccacccaacacctcatttgtttcctatctgcggctctccacatcatctcgccagcgggcgcttttctttccgcgccctatggagagtcgatagtctcttttctcaacataactggcttttacctctattcatcgtctctcattgccgagcgcaatggggcaactcgtctgcgagatattcgggtcctcacatccgcggttctattcgcggttggcaccatggtccgcagtaatggggttctcagcgggttcctatttgcttatgatgcggcagttctgggctggaagatcttgactaaaggacctacactgcacaccactgttcgacttgcagtggtcattgtcggtggctgtattgtaggatccgggatagtcattcctcaaatcctagcctaccgcatgtactgcatgtccgagggcgatcttcggccatggtgtgagtggactttgcctagcatctacggctgggtccaaaatcattactggtaagcagtaattcgtgtccgaataccaccgtcctcactcttactgactgcaataggaatgtgggattcctgcgatattggaccgtctccaatatacctcttttcctgttggcggcgcccatgttggccattctatgccgatctacgttgtgggcattacaaagtccctcttcctcctcgactagcccgggctcaatgctcgctcgcttggcggttccccagggtttgctggctgtcatggcattcaccagctaccatgtccagatcatcaaccgcatatcgtcagggtatcccttatggtattggtatttggttaccagtgcggtagatctcagttcaagcacacccaagcaaagccggacccttgtagccgctgtgtatagcatggtggcctatgcgttgatccagggtgttcttttcggttctttcctacccccggcatgaaaaagaatgaccagcagggatgacccggctcaatattggcccgagtcacctgctgtatatattgatatgtgatttaagttagaaaacacggcctagactgctttgaatgaccacaaatgccgcctcccgagtgttggttgggcaaaatgcttgcgtaaggtgcctgtctgcctaaacaggggtggaagccgcagtcgcccaccaactgaactattataaattggaaaggaagaggggaaagaaacgaatctcacgcatcttttcaaacaactatcaaaaacaagtcctactatatctttagtgtatctttccacgcggctcactctgcagggcccaagcttcgttacgtataattatgtcatcacaacctcgactctctcccgtttgacctcttgaccttcaccatttaggcatctcaagaagaagagaagaatcggaggccgaaatcttgagctgctcaattaccaaaagaaatacgagcccgtcatatttcccctcgcttgccaagagaaaaagtaccccatgcgaacacagccgtgtgaaatacaatagtattcggttccaaatcccgcgcttttcggagtagcagcttcagagtttcattaaaagtacgatttccttcgaaacttcttctattattgatagggcgccggaaaaaaagatacccttgtgaaatatcgacgttgctgacgtattgcttgcttctagagctcacccgacagcaacggcaactcttccctgacctccatacccacctcgtgtcgaccattcccttccctatcccccatccgacgatggaagcctctgttcacaaggcggttctcacatccgacaatttccatcatgcacaagagctctcccgggcgacctcgcccggtggtgagcccgtcgccgtgaatagcgaaggcgaaccgatagcccgcgtgcgcccccgtacctatccatacttcaaatacctcccataccacctcgaggatgagagtgagcggaatcaaaatctgcgagagattttgaaccagctctatattgcagtggaggccggtgacttcaatcccggagccgtgcactggacacgcgagctacgcggatggctgtcgctcaagttcgatccaaccaaggcgcagcgaatcagccttgtaaaattgtattttgagcttgcgcttgctcctgggattgacccgtcggtcgctgagcggtttgcgagcatgttcatgcttctcacgaagtgagatgggttctcagtgttagttgcgaaagtaatgcggctgctaacacatcatttaggcgcaagcattatctcaaaccagtccaagatctcgtcttagattggaagcctctatacaaggagctcaaggctttcgtcctccccaccgagtccggcctcgttcactcgaccaacttgaagcgcaatgttaagaccttgaccaagctttgcgcatttgctcaattattcattgacccgtgtgagctccccgctatgcttgaggagttcttacctcattataccacatcattctcagaaggtgccttcgttgtcgccgggctcattaatttgttgctcccgacatccccggctcccgaatcgcgagtcgatctcctaccgcagagctatctgcctacacatttccatctgtggtcattggtcggtcggtcaaaaacatttgacacaacatatctggactatctttcccgattggccagagattctctgccggctgctcacattccattctccgagcatggtatcttcacaaaggaacagtccgctctccttttcactgcgatattgaggttgttggagatccccgtcgggcaatccacttccccgtacagtgccttggtggatatttcgtctggtttgggtatcatgcttgatcgagatgggcggaagcaccctgttgctcatcatattgcccggtggattgtgatgtcgctttcacccgcttgtgtagatgccgaggtttcagttctcacacagctggaaggtctaatccaagctgtcgagacgttcttccacccttcaaactcaggtcattggactaagaccctgtcccaactggtttattacctgactgatttcttcgtcatgcgttggaatcgcgaacaaagtggtgagctggaagtcccgcctgagcgacgattgaatgaggctctgaagaagcggtttgtcttgtgcatccgtgacgtagtcttcatgggcatatatgctaagagcggcactgcaattaccttctccctgtcaaccttgcaaggtctggcctacttagaaccgcatctcatcctacccggtgctttgcagagaatctaccctgcgattcaaggtcttgtcgaagtacaccggactgcatcttctcttcgggctatgacatcgctgtctcgtgtcatttcgcgtaccaagggttatcgttgtcatatgacaactttgttgggtctaacactacctggaattgacgcgaatgatcttgaaaaatcgcttcatgctctatcattcatccaatcggcctgttacaatattccaatggtcgacttgacccaagggcgagaggatatcaactgcaacatgcttgccatgcaatggatctcaggtgaaatggagaggatggaagagcaagggtccgatgtacagcttggttatgatacagagttagatgacgagaccgaggaattgatcttgcgctcttcgacatgtggtttcggagacttcacgatagctttcctaggtcgtgtcttcacactcttggagaatctgccggacgtatccagggttcgaaacggttcacccgaagagaatatcgtgaacactcttcccgccacgttcatgcctttgctcgcttctctctctccggagtattacgatatcgccttggggaagattgtggatttcgtgtccaaccatgtcatccaccaggctcgtgatgcaatggctttcatctgcaacgccctatgcaaagtcaacccagagaaggccctcaagcgtttcatccctgtcttgacttcagctatccgcactgagatcgaagataatggtgctggatcaacccgaaccacaggaacagatgttttgcctcgtgatcgaagtctggtatggaatgtcagtatgctgagcatgtgcgtggtgcatgttggcagcgccgtcattactcaccgccaagaactgtttgacattgcagtctatatgcaacagaactgccgtggcattcctacagttcatatttccaacttcattcaccaccttttgctcaacctgactgggacttatactaatgatttctcactctacgagccttcagtcaaagcgaacggcatcgagccgaagctctggagttaccaagccgatgtgaacaacctcaccatcaattggcatgtgccgacgcaccaggaaattgagtttgctgtcgacgtgttcaaaatccaaacagaaacggctttgaagtccctatctgcgctgactcatgagacatcaaccgttaagcgtgatggaagcggcaaggactggtcagacgaggtcactcgcaacctcgtactcctgcggctcgtgttatctggagtttctgtcctctttgatcccaaagccgcatcaaccacaacacaaggaccctcgaacggtacctccggggatgtcgagatgaaggatgattcgggtgtttctaatgaccatgagaatgatgaagatgctgtcctggacagctctgatgatgctataatcagacaggctttcacatatccaactgggtacgccctcaaagagggagacccattatacactaccatccatgaactccgtgaacgaactggctgggtgttgcatgatgtacaccggttcttgagcgataagcaagaggatgatgttccttgctttggcgctttgtactctgcctttagatcgtggtttgttgatgtgggcattgaaaggtccgctcatgtactcgatcgagtgactcgcctcttagccgcggacattcatccttacaagatgagtggtatgcgaaaagattaccccagacccttgcttgtgcgcagagccaacgtgtatcacctccaacgcctacgacacaacgcttctccccgtccgcgatctaagcttgatgaaattcttcttcttgatattgccgaatcttgtgtctcgctctacacagaaacgcgccgcaatgctcaaaacgcaggcgaatcggcactaaaagcggtctatggcggcagactactcgtcattcctcctctgctcacggctctgcagaggggtgtcaaggaaaatgatcatgcacgcattaagggagcactctactcgctacttctgagcagtgttgccaagactgtcgggcggcattggaagtatgcgcctgccgtggtcagaacatttattgatgccagcgccgttgataagccttctgtccagaagatttgctctaccgcagtcttccaggtcatggattacggtcgcgcgatggagcgaatggctatcctagatcaagagattgtagaggcaattgctcctattgaagatgtcagcgagcagatcgagaaaaagcgcgcagttgtcaacagcaagcgtgttgctatcgagaagaagaaagccgacctttccgaagagctggtcaacctggcgcgggtgtcccattggaagattgccagtcgcgctgcaactatcgttatcactatgggtctccgctttgactatatcgccagcgataacttgatcgaactgatgacactcgggtctattgacgaccaccctggcttgcgaggcatgtactcccaggctctcatagcgctgttcacgatgattgatgtgcgggccatctgcacgcacgagtacaagaactatattcttggccatcagcgtttcccgtccaagatcaaggttgcaacaaaaccctttgagaaaggatacactgaacaatacctttctagctttgcaaagcctgaggcagagtactacgttgatcacgacttcccgggctggcttgtgtggggcaagactatgccggcttacaagtccaatgtagcacgggatatcgagtatgacgatgttgaatggaaggttcgcaccaagatgggcaagttgtttactcgcgagtggttctccaaattcttcatgtacttgaagcaagagccacgggacccatctgctgacaagttccgcatgtcctgtgctatgatgcttctctacgcattcgagctcatgatccgagatggacttacagtcgtctcgtttgaggaaatccaagaggagattaaggacgtctttggagacggcagtgataagcaccaacatcgtgccacggctgaaatcctcggagctttgatatcttcggtgacggatacaggcgtggagaagcggactatggtctgggaatatgcattccctattgtacgaaaggttttcaccgatggccttactccagagaactctggctattggacaacattccttcacatgatccttcaatgtcgtgatcctcgccgcgcttggccgttggtcgattggttgtccagcttccgtcttgatatgtcgaccaacgcagcattcaaggaaagctctaagatcaacctcctgcatcaatgtatcattgattccggttggcactaccagctcgaaaagcccattgtgaaggatttccttgcgcatttggaccacccgtacaagggcgtccgtgaggcaatgggtcaaactcttgcaacgatttatcgcacgagataccacgagtcgtaccctgatgttcagcatcttctcgaggcccagaaatcatcctcttctgttggcgcatacccctatccgcctactaaagactttaccaaggtgattcatggggttttcagtcgaatcgaggaatggcggaaggccagagctcctggccaacagacaccctcatcctacacctcgggtagcaaaactgttcttctttggttggactcgaccttgtcttctcatgagtgtacccagcttgtcccatttttccctgatgtcttcaccgcgcagctcctgcacatgatggatgtgaaggaggacccagagcttcaatccctcgcataccacgttttccgtcacctccctaacattccgtaccctgcggagaaaaactccgaattcgttcaatctctcatccgcatcggacagtcatccccgtcatggcaccagcgcctgcgtattatgatcaacatccaaatcatctacttccgccgcctgttcctgctcgaccccgcagaccgcgacaagctcttcgagtgtatcgcctccatgctcgaagacccccagcacgaagtccgtgctggcgcctcggccacattatccggcatggttcgatgctcgcccgtcttcctgcgggaaaagatggtcagtcgcttccatgaacgcttcacgaagcttctggcagacaaccccctccctaagaaaccgaagaacttccgctctggaatcgcctcctccgccgtctcatccggcgctggaactcccacccccgagcacaaccgcttgattatcattcgccatggtgctgtgctgggtcttggcgctttgatccaggccttcccttacaacagtcctccgcctcactggatgcccgaggcactgactacgctaagtatccgcgcggccaacgatcccggcatcgttggttcgagcgtgaagtcgattatcagcgagtttaagaagactagacaggatacttggcatattgatgcaaaggttcgtacttatgatataggttcaatcctcgaagcaaacggctaacgattttcaatataggctttcacctcggatcagctagaggacttgtcaggtgttctatggaagagctactttgcgtaaatggaacttgggtatttaattttcgtgggtttctttggattggcggcgggtttcctaatgacaatgtgattaatggccgttcgtacatattccaagctctctgatagggtggtgtatctttagtacggaaatgaaagacttgtgctatgcttatttgctctttgtatagatactctgggtgacctattgtgtataaaggctataattcaccgtgatacgcgtcttttctaataagcccaagaattgagtgtgacaagtgaaagaacaagccaagcaatgcttcatattcaacgagcagccatatcaggaaatgagagtgacatccgctcctcaatgtgagactttggaagttctcctaggatgttggtccctttcaatggtatatggtatagctccgagacctaatactatttacgaaggacttgtatctcccacggcgtgatacattgtatgacaatcacacaggtcatatattagcgacatgattattccaagagatatccaacatatagctattaggcttgtacaacttcagacagaatactattgtgtctatctatcacgttggattctagtgtggcattacccaaatcttaatcgaagatgcagtcaacaccgcgtagtgatgacatcgtaggaccaaacccttccagtcattacggtcaaacagatccgttggttcctttcactgatatatgcttgttcatacagtctgattgctcacctctgcacttccctttccatcttaccacgcacaccacgcacatcccgtggctttcagagccaaagaatgcaattatccgccctgtaacttgactgccactcattatgaaactcctcaagagaaacaggacgccatctccgttttacattaggtcttctgtctctccacgggatcgccggtggatctggttgcgctggctggggtatcttacctgtctggtcgccgttgtccaaactagctcatatctcttcgggtacccggagacaaacataatccagactgtctatgcttcgttacagggccccggggtccttcggcctggtcagtatcatgggaatgttggtttgtgggacaagatagcaggcgaccactcacctgagccagatgcgttcggcatggcacatgatcggaggtttgtacctatcccaagcagcttatgcgtgagttgatacaagattatgctaacaatcaacccttgcagagacaagcgattctatcagggcggtaccctaaccctaactagtatcgagtctgtcaacgcctcgcacccagtcccacttgtctacgatccatacccagcatacaacagccgagaatggaagaagcgattctatggaaggttccagccctgccttggccccaggggccgtaatctcaaccggaggtctgcagaagatatgatgcaagtctacaagggtcaacaagccgggttcccagcagcgcgattcggatcgtacgaggcattgggcctagacgaaaatgtttgcacagaccgttactcccgctacggggcatatggttacgatgacgatggcgaggacgagataccgggcttcacgcgccctccctcaattccgtggtgcgaggttgattggcacagactgcaaaacctctgtctagaaagaaacgcagacagatacgagtccattgcgaccgccaattcttcaaatcagagtccactagcctttgaccttccccaggattctctcaaatcacgggagtcacctgcaggtgcttcgggtgtgaagcagtaccatcctcgctcggctgtgctgattcgggcttggaatgggctcaattggaagcctcaccatcgtgaataccttcgggccttgattatggaactttctctgcattctggtggggaatatcagatctatctactgtgtcatgtcaaggaggacgagatgcccattttctctgacatcaagaccatcaaccggctccggaatgccatcccgaaggaatttcggaatatggctctgttcttcaataacaaactcttagaggcttggtatcccaagatcgaagagcacaggtgaattaatcatttcccattgaccgatgttaaagacacccttactaacagcacttacagtccccaactccaacaccaccaacctctgcaaatattctcccagctgtacccacacttcgactactactggcagctagaaatggatggtcgccacacaggacacatctaccaattcctagacaaagcagtttcattcgcacgccaacaaccccgcaaatacctctgggaacgcaacgcctacttctacacccccggcgcacacggcaactggagcgaattcaaacaaatggtacacgacagcctatctgacaggtccaaccttacaatctggggcccagtatccggcaccgggatcagaccaatgggtccagtcccaccagtgccatccccagactatgacaattacacctggggtgtcggcgaagaagcagacttcataaccttcctgccaacattcaacccgcaaggcacgcaatggacattccccgacaaggtctggaacttcagatacggccagtacacgccgcgccgcgccgcggtcatcaccatgggccggtactccaagcgtctactcgatctgattcacaacgcgcaggcgacgaagggtctcggacttgcgtcggaaatgacaggtgtgtcatgggctctgttccacggcctcaaggctgtgcatgttcctcaccctatctatgcggatggccagtggacgccgaaagaactcgcgcgcatctacaaccccggtccaccggagaatgttaatggggctccggatagtatctggaatttcgatcatatgtttgaccatatcatgtaccggctgtcgtatatgtttacgacgcatagtgcggaagatttgtacaggcgttggctggggtacaggactgcggagcacgagggcgggaaaacagtgagtatatatattcgtctgctgttttgcttctttggaattagggagtgatttactgactcgtcttttctagatatccgaggatcgctacggtcgacattgtttcccgtctatgtttcttcatacgatcaagaacacggctccacaaatgggcccagacagggctgttccatgattcatatccatttacggtggttgacttgttgacatctcaaaattcttatgctttgacttatcggcgttgatgtagaaggcacatacgacttgcttcactgtctaatttagagaatctgaagtcatttgatatcatttgcaaattaaggaatcgcccattgttgcagttaccagactacgaagagatatctgccagggtagataatggttgcgccatgttaaacaaatcgtagaattgcactaaaaccgaactcttcatcgctgtatacaaaaaaggagaagcagtaaaggccaccaaaacaggccacgacgcaaaaaattaggcaacttatgtacgtgactggaataagctgatgaaccaaaagcaatttaccgttcatatgctctgtgagttttgataatccccgtcccaaaaatgaaagtagtccatctcatgacatcattaagaaccccggggggatgcctcttcgtctctatcccctggaattatacttctcgttgaaagcattgaccgctggaaagggtatttggttagcaaatgacattgtttagcatgatcagagtaactacttaccgacagcaatctgtctatagagccagttccgcgagctttcatcttggacaggaatgaaaggtccgttggcaccacccttgagcgtgatactcattcccgtgcgctccttggaaatggtctggatatccgtgaggcggatatcccactcagtatacagcttcttcgtgcgcaccagcatgatacgtgcgtacgtcaacaagaccagcatgtctcggccaggcagctctaggtgggcaatgtagtcttcgtcgaagtatttgccgtcgtccgtggtcttcagccagaactgtccgagagcttcgcgctgcgagtacgggcgcacaatgccatcggtgccaataaagcgggtgagtcgaacacggtcgagaccttcagcatcgaaaacagtagtggtgttgcgaacaccttctgccaaatctagtaggggattgttagtgatgaatactagagaaaggggatggttcaacttactagaggcaagatcgaatgcaccgatcgctggcttggtagccaatccaaggacaccctttccaacacctttgaagaatccttggataccttctttctccgcaccttgcagtggatgacgtgccaagccaccgataccgcttgcaagactagttgcaaaggcactgccaccagccgtgattccatacagcgcgtgcttggggcggttgcgcaccttggacattcggcgctggttttggaactccttatcaagtgtagcggcggcgagacccttggacatacttcccgtaagcttggccatactgtccgagaatccgaagatggacttcttcatgaagctggtagcaccctttgcgataccaagacccagctcttggggacggtcggtcatgaccaaaccctgatatggctcatagaagatagcggcgacaccagagctgacattgttgaacaaaccgacagggttgcctaggaagtcggccgaaccgagaatgatatggatctggcccaggaattcttgggtatagtgtgcacggatattggcgaccaggctggggaaagagacacgggcattctcgagcatcagagcattgagtcggactggtgcatcattgacattacccatcgacattgtcatgacgttgacaaagaacatcaacgggttggagggctgcatagtatcttccacattgacgcgctcggtgcgcatgaatgaaatatccatctgcattggctggagatgcaggagctcgaagtacacatcctgaccattgtcttcttgtcgcggctctggaatgttgaggtcttcatcgcacagtttgccctcttgctcctcggcccacgaagcacccggaatcttgacaaagtcaagcatggcaaggacgaagtcctcatccagttcaagtgtcatttgctgcaatagcaaggtcgcgtacttgatatacagaacaccatacgagtcgtccttaacccgtgtaaccattgcatggaagatcgggtgtgcttccatctccttgccagtcttcggaacgacactggggtaaagcaagatggggaaaataccaccgtagagctggttgtcgatctggatccatttgatagttgcgttcagagtctggtacaacctcgattccctgaacttgaactcaatctcgcggaatgtgagatacagcagctctttcaggttctggttgatcaatgaaattccaatgccacctaggcgaagttgggccttgaagttgacgtccgaattcatttccttgatctcgaacccagccgtggagccgacctgggaggattgtctactttgttgcttgtacatactcttcgacggtttgaagttggatagcacaagagtctgggtggggccatcagcagcaatgttgatgtcaatgatcttctggtgttcgccaggctgcgaagctggaatccgcattgggatcaggtttcctatctcggcaagtttgatatggcgctctttgccctggcaggtcaacacgagcgacttgttcttcgtcgccgggtagtcccatgcatacggcatgatgctccgcgcgggaatccgataccggatcggcctccagccgctagtctggtcttcttcatcatcatcttccacatttggattggcttggtagaaaatgaactccatatcgctttcgttacgcatggagaacggccaattgcgttgctcaaggctgaagtgcaagaaaagagttgctccttccatgatgatatcaatcttgatcaacttctgccgctggttcgccttggccaatttcacgtgcacggttcccacatcggcgatgttgaacggggaagaccattggttgttgacgcccgggaagcagaggcacagctgtttctcttgaacttgacgaaggaaatgaagcggtaccaactgcccgtttttgacctggagtacgttggaggagcctggctcgcgagccagaagatcttcgttgagcttgctctttaggatgaaccgtggagcaagagtgaccaccttggtcatcttgtacttgccctcgccttcagcaacagacactccggagtggaactcagatcggccttggcgatctgggaagatgacctcaaaggtactaccaatagcctcgaaactctgcggcttactccatgcagaatcgctgaccttcaagatagatcggttgctttggtcctcgttggcataagagtacatgtatggaagtgcgcggccctcgtctcttggatcggctctgagtccttgaccagcggcatttctcgcagattggaggaatgctttgctttgaatgtccataggaaggccagtcttgttcaagacaaggtatgggctgtacacagaaaccttgaaagcaccaccactgttaggaatgttgaagtaatgaagctgtagcctcagttgaagacctcgctcatccttaagagtcaaggtatgctctctgcggtagtcttgggcattgccgttgacaatagcaaactcgctctggcggaagaccgaatcttgcagatcaatgctgagcaacagcaagtgggaaagctccacgacgtgaaccgggctgacgccacccttcctcaagaagttcgtccaatccttcttggtgttcttgtcgtagatgcggtacttgaaatcgtagggcaacaggttctgaatctccacgggagcgaagattcggatcctcatgtagggatacacgctcgtaagcgaatccttgctatcaaacgttgcgttgacttggaaatagaaaggaggagcctgctgtccattttcgctaatgcacttaaccgtgcgtgtaggtcgcttgatgaggtccttccagaacaatcgctcatctgaccagtcatatccgaagccctgatcgggacgaacaacgatagaatggagatatgctgatccaacgggtgccggtcgtgcgtccccaggcaaaatcttctcaatcttcagcaagtggccttctccggggctgaaaatgcccatttccacgggaatttgggtattgttctcgataagaagtggcgaacggaatgtgatgtacttgacattatcgggtcccagtttgacttccacgagtagccggtgaagaacactttgttgcttcggcttcagagcgtagataacctcgccctcacgcacgacaggaatgcggctgatactatcgaagccactgccttccagtttgacaccaaccactccgccgtggccttctggggtcagcgattcacggatagcggtggaatcttcaaatcgccatggggcttcttcgccgtcggtaagtttcgccgccgggccttccactccttcgctgacatcggcccaaacactgaggtcaaacccagtgtagttgcggattctgtatggggcatcagcgcctcttggcttggcgaggacatcctgatcagtagaaaggaactggaaggatttggatgcgagtgcaatcgtggcggatgttatagtaagctccattgtcttgtgcgaatacacatcgaaagagaaaacatccgggttggtctccttggccatgtggaatcctagctgccagggctcaatcaacggctcccaggccgacttcgagaagttatacacattcatgaacgtttcgaagttggtatcggcattcagtgtcgatgaccagtcgcgtacatcgatgttgaatttcttgacgctccaatcgaccaaaggtagatcgtgtagatcaccaataagaatgactctaactccgtcgatcttggcagacatctcttcgcgcttgaggacaactgaactttgtggcgcagttgtccgatccaggtttccagctccttgactcgggcggttggatctcttaacaacggcagaggatgtcttgctagaagaacgccctctggttgtcttcgtgtccgtaattttcttcgcctctccgctctcagtctgctgggcattctgggtcatttcagaggccttgttgacaatctggattgccatcagaatatcacgcagagacaagcgaagaaccaaaggctcaaggtgcacctcaatggaggtcaaagcagatcccttatcttgcgatcggctatcaatggacatttcaagagtgaaatcatccagaatgcggagtcgagacgtctcaaacttatccatgcggcacaggaacatgcccactttttgaatctgcagagtcgacacattttggtgggagatgagaacttccttggtaccaaggacgatagcttcagagtgaggaatggcagggttggccaccataatcacctgagcgtcgacaagattgacccggaatgaaacggtcatagccgctgctgtggcatcgcccgaagaagcctcggttatagccttgttggaacttacaatagtatcggaccctgactcagactcctcgggtgattcgctctcatcctgcacctctattggtccttcagaggcaaatgcagactggctgaatgactgtaaagcagacagataatctaaagcaaacataatgcgagggctatcaatagtcagcatcgcaatgaggtgcttctctggtcctccagacatggacacgctagccatgaactgctgttggacatcgttgttgatcaaagacatgatgtttctaaacttgttcgagtcctgcttgcgactatcgcggatggagaatgaatgaatgaggagctccgactccaatgagccatctgtcaacatacgcagcttgactcgagtatcattgagagagaacttggacagactggagtcctctaggcggccgacgggctggtcgtcgtttgccaggataagctccaggccgacactgtcgaccttaaagatcatatcaagtcgtacccaagtctctctgttttcgtcatcagggggtgctcctcccgagccattttgtgcttggacggcctttgaactagcctccctagtaggttcagtcaccgacgagggcaacgactccatagcctcgagctcttgctgttcggtatctgtggcaaacgcgttcggtatcgactttgacagttccagcaagaacttgagctggctctgggagatacggaggttaattggagatagagaaccctcgatttccatatctgggcgtgggttgtttgcttgatgctccaaatagcagatgctgaactccaagttcaccttctgaatcatctccagctcctcggatgtaccatcttcgaaatggaagttggatgtcaggcgaatattgcggacaccagtcgagatgacgttgacagcagggctgtcctttccatcatccatagggacaaattcattcttagcataaatttcaccgaggtgagcggtgattgtgtctcgagggcgaccgtccgtcataacgcgagggaaaactacaatgggcgtcttcacaataatgtcaagccgcacacgtgaagcattctcctggagctggttggcctggctggcagcggcttggcgagctgcattgaaaatggcttgcatcttgccaaacttgacgaggaagtggatgatcttccggtagggctcctctagaaaattgatcttgatcgaaccagatcgcagatagacctcggaatcataaccggggtgtgtctcactatcgggatcgaatgtctcgtacttgaagtccgcgaaatcatctccttctatggtcagaaggcgtcggatatcagagtcctccgcggcacccaggttgacatcgtcgaccaaagtcagacttcctatccgagactggatgagcatcgagctgcccacgaggaaaaccccgacgtcggcagtgttcaaactcaaagttgccaagcggactccatcattgttgaggatgagagcaatactcttgaggttagccttgatgcggattttcccagcttgctcgggcttctcttccacactggcggtcccttcaatagccttgtctgtttctgggttgggttgagtcggttgttgaggatttgtgaatgtaaggagggtgaagtctagaagcgtgagaagtgtttttcttgtcacgacaagattgatagtggagactgatatgtcaaggttcatggcaaccccttcatacgttgagtcaaactcaggggactcgggtttaacccgtaccatcttcagttggaacaggtccttgtcttcgtcggcatcaaagcctttagaggagatgattctcttgaattcaggaaccggattctcctcgatgtgatcatccacgcttaaagacttcagaataacctcagcgaccatgtcataggggcgcatgtaaaagtccagttcaaatccttcggcaaccagttcaaccagcaactgatcccgttgcgggtcatgggggtcagaacgggagagtgatccacgtagacggccaacagtgaatttgaattcgaagtctcggcgatggatattggccggtgtatcgacacgcttctttgcatgttcgctgtctacttcatcctcatcgtcgtcaacaacagggaggtcacgttggactgctggttggaaggatgatgacctgtctcgtgtggctagggctgcttcttccttggctgctgcagtaactgaatcagaggcagacttttccgtatcgaattccgggattgcaatatcaatcaatttcatcaagcccttgtatttggtgtctgatattgatgcgtgaagctctggcagatgtccggagatgcgcgttcgggtaagctgtgtcacgctcggtacgatacacatctccagggcaaagtcgacattgatacggtcgatgatgtggaaattcctagattcgacattcgtgttgagctgcgctttggttgcatcgacgccaggtccgatgaggacttgggtggagtccagtttgatgaggaagcgatcgtacatcagatgctccagttgcttgtaatcatcctccgcatattgttttttctgcttggactgaatttctcgcatcgctttgcggtcgaccaattcgctgttgacactggcatgaccggcgtcgataatcaaacaaagtgaacttggttgtgtgatgctttctggtacaataatcaaaggcgcgtggatatcgaattgcgcatcaaccttcttgtgttcttgcaaggcaaactcgaggccggcccgggtttgctgccgcagtccttcaaccgtggcacccgcggtatctaagagagcaccaatcgactccatgtgtcgctcgggcggctcaaagaacttcacaattcctacgaggaatcgagggttgtaaatgacctcaatactcttcagcttgacctttaccgccgtatctgcatcgctgtcgagcgggttcttctccagttgcagatggaacaaactgtcctcatcctgaagatcgtctgcgctagtttgggaggcgagctcatcatcatcctcgcttagctcttcaacctttgtagattcagggggagaatccttgaccttgacgatctggggataaagagtcccggcagtagtgccatcatacatcttcagccctccaaggtccagatcaaggagataagaatcatggcgttgaagtgccttggctcggaaattgtcaaacactagcttcatgacctcattggctgacccgtgagggtcctggattaacgtaaagctaccagctcgaagactccaattgacctgaagtttgacccattcccggggcacatccacactctcggtgatagccttcttttcatcccaatcgatggcattatacaactcttgtcgctgttcttcagtcatagcagtctcctcggactcttctttcttagcgccccagagccaggcagaccatgattgttgttctgcgggctttttgaccccgacattttcttttcgtagctggttccgtgcaagtgagcgccagaatcggatatcttcgtagctcagttttgcttccagtctctgcagttccttggtttcttcgggcgtaaaagcctcttccttcttcgattttttgaacaaggcaatgtacgcgatgcggtcatctctgcgctccttgatatagtcccaggtccagcgcctgtttcgttcgtggatcttgctcagaacggcttctcctgcgaacctcatccatgcccgagggtcttcctttggtgaggccttaggctggattttcttatgttcctgatggcgaatgaaataatggaatagatcgaccagcatcaacgcgtcgcgatattgtttctcatcaagaacaaagccgagctcatcgaagagcaaccgtgctttgattgcgggccgttcatatgtgcctgacttgtccatttccagaccagcacggccactgacggggcgcaacatgaattggtttccttcgtcggcatcaattgcagttctcagtttctctatcagatcagcgcggctgattccctgggcctctgcgcctatatccgagcctcgcccggttcccagcaatttggcatcagtattccaataagccgaaagagcaccgaggacggccaatttatgcgtgacacttgagtcggattggatgaaagtcggattccattccccgtctgtgctgacggcactcagttccttgagtgtcacgccgacagcaaacggatgcccaggtgatgcgatagagtcttcgtagcggaaatgcacattcttgatagaaatctgcaggttgtccaccacggccgtgatcatgctctgtgtgaagctctgattccggcgctgttcctcttggctcatgccttccgcattgcgctcgcgtagaatctcggcgctctcgacccgttccatcttcagcgcattctctctctttgcttcctcttctgggtcaaagtccgcatcttctctgggtgccgcgagcaggaagacatcttgaatatcgactttcaccggtttgcctcgtaggtttgaccatgggattgatagtgtaagctctccgagatggccttcgacgacgtttagagggaggcgtagctgatcgagcgcttcgcggcgtagttcaaggttccgtagcttgacgtcgcctgaccagattccgatgttgagctgggtcgcatcgaagttcttgacgtaaattcccaggaaccgattcagtaggttcgctactactccctccaacatgattgcggcgtggagccgttgaccgggcctggtggtcggactctatggccggtgcgggtgtcagcaggtggggattccacgatagtctgtaattgaagggatttcgcaagtcagtggcgatccaagtgagaggaaacaagggagcctcttcattaaatggactcttacgcgatagaagggttgcttttatgaaccctggctgatagggaacatccaagccatccaactgagagcacgcgcgatactgaggtgggacctttttcccctccaagcagagcggaaatcggtgaagatatgactagatgtcagattaagaagggatgtagagaaatcacaagcgctaattgagacaaaatgatgttgggtattccagcccaagttcaggcaagttaatggccctgattgcgtggatcaaaagaggtgatatctgttacgcaaattgtatgatcgaggtactcgatacaaacggggtacagcttcttacgccaggggcgggtatcattcccgcctaccaccaagtatttgcaaggtacagagtactcaagccacgatacacttggcactacgtgggaagttggggggccagtggtaagtattttggttacttttgttatcaaagccgtttacgcacgaggcaatgaccctgagaatccctgcaatatactgtaccgtatgtactggtggatacacttgtttaccccaggagtgacgtagccaccctggttagggcagcagccccccgaatttgattggctggggaagggacattatgcctgaggcaactttatcgacacctgaggccaaagcttctgcatcgagttgcaatctgcacttccggtcgctgcggtccgccctaaagcacaccacacctcatcactcggtcacttcatttctggatattcttatttgttccctcccggaaagcccacgccgtcgactttctgatcaaagtctttttccgggtgtataccctcaatctccactcttctacttctgtccagcttttctttcaggccaattgggtgagtaaacactgctgtccggccgtacccgaggcttttctcctccaacttgctaacccgacgacaacgaaaagctctatatctccccgccatgtaccgcaacgccgccgcccgctccgcgctccgcgcattctcgagctccaatgcctccgtggctcgctccgctctgagcaagcagatctgcaaggcccagatgacctcgtcggcccgcagtctgctccgtccctccgtctcgtgcttcgcgctcgccgcccacaagcccgtcaccaccgctcttgtgcgctactcgtcttctgcggctaaggtgagatacggcatacgtcttgtgatttgtggtttgcaaaagacactcaatggctaatgtcgatacaataggagcacgatgatgatgatgttgatgttatggcgggtatgaagtccgaggctgtacgtatttccattcgatgtggatctgggtctgcatatgctaactgtgcctcgccgatatagaaagttatcaaggaaaccttcagcttgagtgaggtccccaaggaggccctctacctcggtatggccggtgtcgtcccctacctggccacctctctgcagaccgtcttcctctcctacgagatcaaccgcgctgctgctgttggcgaaggtctgatcttctctggcgagagtgctgagctgatgctgcacatgctcgagcccgtccagatcggatacggtgccgtcgtgagtgatcccgagtgtcttgagtaatcggttagaagtttgctaatcgccgttatggttagatcctttctttcctcggcgccatccactggggtcttgaatgggctggctacggcggtaagttcggttaccgccgctacgccgccggtgtgatcgcccccgctgtggcctggcctactctgctgctccccgtcgagtacgctctgatcagccagttcctcgctttcaccttcctgtactacaacgatgcgcgtgcttccgccgccggccgagctcctcactggtacggcatgtaccgtttcgtgctgaccttcgtcgtcggtgcctcgatcgtggctaccctgatcggccgtgagcagatccagcagaccaccgcctccgagcacagcatcaaggacaagatcaacgctctgatcttcttgcagaagaaggagaaggaggaggctgcggcccgccgtcttcaggcactcgaggtcgaggattccgagtaaatatgccttttaaggtgaggggcatccccccgagactgatctcgatgtttgcattaccgtgatttcctgtagaatatacgcagaacgaacgcactaggccactgaaatttcttttgttcaattgaagtgtcgtagttgggacccaagtattctcgagtaagagtcttatcgtgagggatttgacattccgcatcgagtgggggtagatataagcgtacgggtagcaggatataggtatccatgggatgctcccgcattataatttcatttcttttttcttttttcttttctcaaacggattcaataaagctacactcgtgcttggcatcaaatctgagttagagctgcaagattaggtacgtacaatagctattatatgtcgcaaaagggtacaattgctaatcggcatcttcctcaggtcacacgggttgccgcagatcggagagggataatccaaaggggtaaaacgaatctcacgtacatactcgagcgggtcgatcccattgaaactgtcacggggtgccgaaaatatcgactaaagatctcacggacggagctagctgaaacggcgctggaaatgggaacaaaaaagagggtacttttgcgaaagtggcatggctttctttgctttctttgcttgcaaacggcttcgggggaaggtaaagcgagacctgcatgcgaggtacgcagagtagcgcccaatggcgccagaaaaaaacaacgctggaatccacctggatcggccttttcgtctctttttgtttttttgtttttgcttattttttctttttttggggtgttaatctatggagtacaactgagggagcacgatttttcgtattgtaagttgtacttgttcgcacgtccccgttcctggcaggtttgacaacatcccctctctccacgtctggagataatggcctcttatagggcaattcagccggttcaccagaccagttccagttctccgtgggggaaggaaccttggacattactagataacgtcatctgctggggttatacaacgtacagattggactattctacatcaagcataaatgccaatctgccaatctgccctgagacagggatcttgaatgagacccgggaagtagggagtcaagatcataggcagttccccggaggggttgacgcactcgaatgttcttggcctggactagcccgttctccagatgggattcccttgatttctctctccctcataggctatataccacatccgagaaagctaataattcaataattcttccatatggtgggatatgatattctccatgaataggattttaatcaaagaatgtcaactaatcagaaagggggggggttctagaacgactcaagtgaggaaaaatggaccgtgtcatgtgtacgatcgacggggcttgtggagtgcccaggcttggatagacgggggttggagttgtatatgtgtaatatatacggataggactatggtaggtaactagttcactagttataggacaggatagttataggataactataggatgggtattactagatagatgctcgctacaataagatatataccctatataagactatatccttaatccttaatcctataaacgtccttctccagctcatctcccatttataaagccaaatagtgggggaaagtgacgaggtcttctgatcaaaaaaaaaaaaaaatcccccgaaccggatttctcatttcccccaccccacctgggctttttcaatggtccacccctttggttaaagaccgctgccctggtgctgtgggagatctttcttgttttctcccgattcttccgttttctctatatacgactcgatactggcgtatacctcgactatttacctcttctcctccttcttctgctacctttcaccaaccctcaacaatttccaatctccaatctccattctccattctcacctttctcctttataacggtgacagtgaactgccatatttcacttctataccttggccactgctctgatacgtcacgctccacttttctgccacgggagctggtccccgtatccccaacaccgccacctcgtagttctcctcccctccgttattcccctctttaaatcctggacagtaaaatcgctctctctcttaatacctcttttttcacacgttctggaagatgcgaaacccattcgatttggactttgatagcctcgatggagactccgagcccgcccgggatttcgaggcccccgaagaacatgtgcaccagcgagtggaggacatacaacgagaacacctgaacctcaactatcgtcccaaacagagagacgatggagaccggtcgttgctgcaggacgaggacgaggatgaaatgaagagtcgattcattggcaccattgaccagggtacaacgagtacacgattcatcatcttcgattgcacaggtgtccctgtcgccaaataccagactgaattccatcagattcatgaacatccagggtaggtgtcacaacccatccctttgaatcctcccccgactcaaatattaatttgccccgcacccccacagatggcacgaacaagacccttatgaattggtcgagtcggtctatatctgtatcgaagaggccatgaaatccttcctcgccctgggctactccacatccgacatcgaagccattggcatcaccagtcaaagagaaaccgccttggtctgggactgggagaccggcgagcccctgcacaacgcaatcacgtggaccgatactcgcaccgtcaacttggtccgggaactgaaagaaaggcccggcgccgacgaactccgtgatatttgcggcctcccgctctccacatacccctcgtccgtcacgctacgatggatgctcgaccatttgcccgacgtccggtcggcctatgacgatggccgcgctgcatttggaaccgtcgatagctggctcatctacaacctcaacggtggtccgaagaacaagcttctggtgaccgatgtgaccaatgcctcccggacgatgttcatgaacctcgaaaccctccaatatgacgatcgcctcttgaagttcttcgacattgacccgaccaagatccgtctgcccgagattctgccctcggccgatcccgatgggtttggtagaatggccgaagggccgctggagggtactcccattaccagctgtctgggtgatcaggcttcggccttggtcggtcactgtgccttttcgccgggaatggccaagaacacttacggtaccggatgcttccttctctacaatgtgggcgagaagccggttatctcaaaacacggtctcttgggcaccgtgggcttccaattaggccgagaccgcaaggccgtctatgcacttgaaggcagtgtggccgtggcgggcagtggtgtctctttcctaatgaataaccttggatttttccgtgactcacggaaggtcagcgatttggctgccagcgtgccagataatggaggctgcattttcgtcactgcgttcagtggtctttttgctccttactggatcgatgatgcccagggaactatctgtgagtcttgaacgtgctcgtcatccaaaaacctaaatcgctaacactgccagggggaatcaccgcccacacacaaaaaggacacattgcccgtgcaaccatggaagcggcctgctttcaaactaaggctatcctcgacgccatggcaatggacagtggcaagggcctgacagaactggctgttgacggcggcatgagtaactctgatatttgcatgcaggtatgttgcaacgtgttttctcttaaactctcagacccgctaactttcatttgtttcagacccaagccgatattattcaaatccccgtcgaacgtccctccatgcacgaaaccactgccctcggcgccgcaatcgccgccggcttcgccatcaatatttggaaggatttctccgaacttaagcacatgaaccgtgccaaccgagcctccttcgccccaaggatgtccgtcaaagccagcggccgcatgtataaaaagtggtccaaggccgtggagatgtcgcgcggctggatggccgacgaggacagagaggaatacgacgaataaacaccttttttacatatccttttgagatgaccccaatcgggtccgtcatcgaccccgcggcccagtttgtgcaattcataccatgcacgatacatacacacgcgcaagaagcaagaagcaagagagatttgagaggtttacatgaagatcatatcaaccggatatcgcatatattctctcttggagatacccggaattttttctttttcacagggacatctggaacacctcgcgtcttccatttatacatatttagagaatttccaatcccgactagaaagtccgtcctaataaggcgttttacccgcccacgccgatgtccccctccaatcatgaccgttatgacgggaagtcgtttgttccagaagaagagctggggattttaccttttttttttttatctcattttgctgttggctagcttcctctcctggaacaagctcgacttaactaccacttgtgtacatacaacccgtttttgagaagaaatgaagaaaaaaaaaaattataaacatgtcattctcgttcgtacgcaaataaacaatgaagcttaaaactttattattacaacattcccacccggaatcgagaataccccggaatccagtttctgtctccggattgacgtaaacaccatgacatcataacagcggggtagtaactaaccaagattactggttactggttctaaccaatagtggagtgagacatctggttcattttttagttcggcgatgtgttcaatacatacatagcttttcagatcacatgatcgcttcagcctgtggtgtcctaccatacatacatagtgaatagatcgtagaggcttcgctgttgaacccttggaagtggctacgatccatctaatgcatgtagagagggatgttgcttgggtcatttatattcccctgtcacggcttcattcacggaataggccgagatttggctgtctgcttagggtttgggttgttgctatatttggctcgggtgccttgggagggatatatattgtacaacatatgttcatctacatgtacaacatacaccgaagttggagtggaatatatgtatatttttattttcatgctatatcttccctctcggtcattttcatgaccgctttgtagatataaccatatgtctatgagagtaccaaagaggattggcagctttattctacaaatgcgatcgcggatcacgtggtcacgtgcaagagggtatatagatgacctcatatcgcggttattacatggcaaattgacgtcagatgatctccattcgagatcttcaagcgcggaacaacagccgataaccagagtcaagcgtcaatctgactgagacatgatatagaagaaagagaaccaaagagatatggtattttcaatagacgcctggatgatcgaggatgcaaaatggagatgagaaacaggatacatgggtggttgtttgtagagccaacaagaaaataagacaaggaaatgaacagaaaagtttacagagtcggagatgacttattcattgaccgtgggtgctcttcctgccgccgcggacgagttgagattggtcgactgcaaagcttcagggagcttcagcggtgcactgggcaagatcttgagtttattgatcttctcgcccttcagcaccagctccatctcctcctttgtgagagtttcatattcaatgagcgcattggtcagaagctcgagttccttgcgcttttcggttaggatggtggttgctcggtcacgggcttcttctataagccggcgcacttcgccctcgatctcttgcttggtttccgacgataggctgtcgtaattcgtagacaggtcgacgttgccgagtttcttggaatatccgaaccgggtgatcagcgtgaaggccgtctcggtggcactttgaatatcctaaagagaccattagtaccgagaaaagaagacaactaactagtaagacttacagctgagatgccactagtgacattgtcgtggccgaaaaccagctcttcagcagccttgccacccatagagacggcgatgtctgccaaatattcggtgtagttccttgaaacggtatccatctccggaaggaagtgagtaatacccagagccataccacggggaacgatggtgatcttgtacagaggagtagaggaaggagagaagtgtgcaacaagggcatgaccagcctcgtggtacgcagtcaagagcttgtccttgtcttggatgatgcgactgcgagcctcggcgcccatcataatcttgtccttggcccagtcgaagtcgaacggccccacattagccttgcggtcacggctggcatggacggcagcttggttgaccaggttctccaaatcagcaccagagaagccgggagtgcctcgcgcgatgactccgacgtcaacatcaggaccgtattgaatttccttcatgtgatgtctcaagatgtccattcggccgcgaacatcaggaaggtccacaacgacccgacggtcgaaccgaccaggtcgagtgagtgccttgtccaggagttgagggtaattggtagcagcaatgatgataacaccggtagtctgagagaatccgtcgagttccgtgagcaactggttgagcgtttgcttgacataagcagcatcccgctcgtttcgctttccacctatcgcatccagttcatcaatgaagatgatagccggagccttggcacgggcctgagcgaacaaatcacggacacgcttggcaccaacaccgacgtatacctcatcgaattcagatccagacatgtagaagaatgggacaccagcttcgcctgcaacagcacgcgcaagcaaggttttaccagtaccgggaggaccgaccaagagaacacccttgggcagcttaccgcctagggaagagaaacgctctgggttgagaagaaattccaccagctcctgcagctcatctttagcctcgtcacagccatgcacatcactgaaacgagcggtttgctgctcaggctgagcttccttatcctgcgcaccacggacgttcttcagaacgccagtggtttcaaccaagatagtgaccgtgaccagggagatgtaagtgaaaaagccgaaaatgagcaagaatttgacccagcggaacacagtgcttccgagagactcatcgaccacaacgtagagaggagcatccttggcaccggtaccgttttgttttcccattccgatttgactgccagtagcccgagcagcgaccgcttgaccgactgcctggagctgttcagggctcagattgtggtttgacccgccgaaagctccagctccggcgtcggcgccaccgacgattgactgggcctgttggactaatgcttcagttgtgagatctcctgcaaaataaccgctccggtgtcgttcgagaactatgcccggcattttagcacgcaagagagccgaataaagagcattttgagcgtctgcgttattgggactttgattggcgaccttctccttctgggctagtacatgatgccaggacccgccgaacaggaaccgttgctgctgtatcttcgaaagaccgttgaccttcggggccgcgcggagggagttaagacggaatggagttagagttgagtatgaacgagcaccggggatagcatagcggatcggcataaaagatgaggtggtccgaagtgcgttgtctgttatcaatgattagatatgattcatcaaagcaattttctcaagccaaaacatactttgattgagcaatgaagaccacgtttgctgcgaaggccggctgacgatctccgctcgcagggcttcagtggaaatgccttccaggtattcaggcaaggttgcgcgttgagagatctgtctgtatcagcatgaagatgccaagtggatgataggttatgccatactgtttcagttcctcggctagtactgcgccggaaagactcgttgacattgctcgtcgttcgcccggtctgcttccagggaacagccaggatgttatacattgaaggccagagatccgatgtcacggcagcgacattctagcagattttttgggtcagttgtgggatctggatgagaaaccgcggagtggtactcacaggcatggggatcgagacttggaaggccatgactctccgatatacagcggcacgcggccgggtgcgaggatgggcgtgtgctcctcttggtggatttacagccggaaataaaatttgaatctgttaagcccgggttgaagagactgtcattgctgacacaagaatgaaggtagagaagaaggcgataggatgttccgctttgatgcggcgaatggcgacggccacttatgtccgaataggcgaccgaatatatatcacgtgatattaagtggcacgtgcacggcatagccggacgcttcttatagcgtcatcagctctggtcagctccgatgaaggatggaaggagatttaatggggaaaatttgtatgaattaattatgcatgggcgatttggcagagaaaattggtagcaaacgggtaatagtagccgggaagggccaggtacaccagggctgttgccattgacagaagctgcccatggttcgcgcaccccgatctttacaaattgcaacgtcttgacgtccacgagcatttgaacttcatcaccttcttgaggctcttaaaagggccctgtgatccccctgctcgatggctccatcgacatttcggcccacgctttttctcacggacaagctccccttgacctgcatattcttaaagacagacttgctatgtctcgaaaatatatcttcttggtaggagctccgttgccagcaagtctgaattgggatacagacgagcttctcaacacgcccatacctccattttacgagaatacgacgagtacagaacaacagctatccctggagcaaccacctgtaagatggagagtgttacggtcagcatcagtcgacaagctaggtgaaaattatgactctttccaatactatgaggacccggcctttttcatctcgcatcaactggctgttgcgacagatgcgacacaaggatcagaagattcgattcttcaattctacgaccattctttcgccatccacgaaacgtccgaggtagctggctcagatgtgtacgtagcagattccacgcaggagagcagtttggacgaggacagcatgttggctagcactacggggctggacaagacagacactccgaggtcacctcgcattctccataatcctgggtccctcattgatttgaaagatcttcccacggccaggtacatccaatcgatcgcaccgcaaacgatgacggtgaatatgattgtgggagtgctggccgttcaccccccacgtcgcatagtaacacgacaatggaaaaccgaactggacctcatcgagcttgtcgttggagacgagacaagggctgggtttggagtcaatttttggctcaagccagagaagccgaccgccaaaaacaatgaaccggatcgtctaggtcgttcattggcatcacttcgacctcgcgacatcgttttgctccggaccgtcggactcagtacattccaagaccgggtgtacggacaaagtctgcgccgagggatgaccacggccgagttgttgcatcgacaaccggtggatgtgacggatgcagttggattctatcagggcagaatgcaagaaattagctcccaggatgatccgccggcccttaaggcccgcagagtacgaaattggatgctgcggtttgtgacggattcggttggaatgtcacatccatgtggattacctccggatacgcagtagttagttaattggtcaaagtagtaactattgctttcatgctttatgtgaaatgttaacttgatatccgtaggttccgtagagatgtgtctttagtgtacgtactagcgccagaccaattgtatctgaaacggaagaggggaaacagggaatatccccccaccaccaatctccccatcacctacggaggactccgtatatgtaggtttcaggggcgatacctcatgaccataagaatttgaggtttagttttgcgccatctgcattgtcgtataaatcatgcaatagcattggacatactggccggggatggctgaactagacctcaggagatcagagacttcatccacgcgtcagagcggcctagttccttggaatgtaattagaggaatgcctaatccattcacagcaagcaaagtacaaagtcatttcatcccaaacatccaaaagcagtcaccacagctctaaacagccgaagtcgaagtatatggcccccttttcccgcaaacaggcccctccaatcaccgccactcacgtgcccccacttggacaaaaataaatccatcaacggccaggtgttccctaaataacagagcgtctctccttttgcttctcctagcctctctactctattcctaattttctctaattttcactattactttcaattccaatacatcatgaagggtatgtgctattgtcaatgcttccatgtctccccgctaacccctctacagctctcattcttgttggagggttcggaactcgtctgcgtcctctggtaaatatcccgatgattatcttatggcctattgtctatttggcaatactaatattgatttattttagaccctcacccttcctaagccattggtggagttcggaaaccggcccatgatcttgcaccaggtcgagagcttggctgctgcgggtgttactgatatcgttcttgccgtcaattaccgcccggatgtgatggtcgcagctctaaagaagtacgaggagcaatacggagtcaacattgagttctccgtcgagtccgaaccgctgggcacggctggcccgcttaagctggcggaggagatcctaggcaaggacgattcgcctttcttcgtgctcaactcggatgtcatttgcgattaccccttcaaagagcttgccgaattccacaaaagccacggtgatgagggcaccattgtcgtcactaaagttgacgagccctccaagtatggcgttgtcgtgcacaagcccaaccatgcctcgcgcatcgaccgctttgtcgagaaacccgtcgaattcgtcggaaaccgcatcaacgccggtatttatattctgaaccctagtgttctaaagcgcatcgagctccgcccgacctccatcgagcaggagaccttccccgccatctgtaaggagggccagcttcactcctacgatctcgagggcttctggatggacgtcggtcagcccaaggatttcctcaccggtacttgcctataccttacttccctggccaagcgcaaccccaagatgcttgcccctcacacagagccttacgtttacggcggaaatgtcatggttgaccccaccgccaagatcggcaagaactgccgtattggtcctaatgtagtcatcgggcccaacgtcgttgtcggcgacggtgtccgtcttcaacgctgcgttataatggagaactgcaaggtcaaggaccacgcttggatcaagtccaccattgttggctggaacagctctgttggacgctgggcgcgtctggagaacgttacagttctcggggacgacgttaccatcgccgacgaggtatatgtcaacggtggctcgattctgccccacaagagcatcaagcagaacattgatggtaagttttcgtttctgatcactatccctaacaaacatgtactaattaattgtacagttcccgcgatcatcatgtaatccttttcctacttccccctcttccttcacgtcgctatgccttttgaaatacctcccttcaactctcgtgccgataccaccctccagtccgccctcttgatgcatagaaccggagtcgtttactgcgtttcttctgtcttctcttctattgtcggcttgcctttttcctccttgacggtttatcgccctcacaacttcctcccttccgtccgataatgcacttagaaacctagatggtgaaagcgtgcgatttcggctgttttgcaagaaataacttcttttagttttgtttgtctacgtttatccttcgagctatccccgttttagtgctacatattgagggtttcgtcgctacatccccgctcccctgcgcttggccacttgttttcattcaattttttcgatttttttttttactactgctagtcttctggcaattgatgggcaaagaaatcatgccatatccgttttaatgagaacatgggcgtgggctggttctgttgatgtaaataatgggaggcgaaattcgcaaaaaaagatacaagtttagttgatctttaacacgattcttcagatgtttcatatcagatatctttgtagaagtatcatggatggaatattagatacatatttggggataaattacatacagtcattgaagctgttctgcttgaatcagttaagcaggaaattgacttgagagaagcataatgtgtctttgacaaagtcgtgtctaggaatgagcctcagctcgatccaggatctcatcccattgaattctcaactcttccatctgcttccagcattggcgtccgagttcctcgaactcttctctcttttccttggtaagatcttctgcgccgcgcttacgacgtcggagccgatcagcctcaacgacgggcgtgccgacaacacctccatgtccccagccgtcgacctcagtagaaaccgcactttcaatgccaagacgcccgcaagacgaaccccatttcgctctaccgccaccagcccggtggtaaggctcttcggcagcttccacgtcagcctgcgatgccagcgcgaggaagaccggagcacaagcgccgaggtaagtagacaatggatgccagggcgagcccagcatcctcgcagtccagaaagcagcaatcatcgcccacgcaaggggcagaataagcgggatgatagatgtggcgcagataccagggtgagaaagatacatgcgcggggtcgcgtcgggggcatttgtgtggatagcatgtgtgtcaagttccgtctcagactgcaagaagctatcgacaacccagggggccgtactcggcagattggaagtcagcgcgaggatatcagtgagagccttagaagactcatacggcgcatcagtgcgcaaaccctgaatatcgtctattttgaaaaagttccaagtcgcttcgagactagaaacccagaccacacggccaggcccgttcgtgtgcgcccgcttcagcagcggaaccaggttgtgcgccagcatatagtgcccgaagacatttgcgcaaaagactgctccgagcgcgggctcttcttccgtctttgtttgcttgtttgttaacacgcccgtcggcgctagcttataggatggccaggtcaccgcgtggaggagatcggtgcaaacctcccaaatggccgtgggccaactgatgccggaccagccgcccagcccggcattcagaacgatcgaatcgagtcgggggagagtgtgcactagttttcgggaaagttcgcgcactgagcggagatcgccgaggtcgacgctctctgagacgaagtggacgcgcgcggcggcagatgcggagggggaggttgcttggaggtgtgcttctagtctgcggattgtgtcttgggctttgcgcgcgcttcgagttgtgaatattatggtgagagattcagattctgcgtgggaggagaggaattcgtcggcaaggcggcagcatatggagaatccgaggccgctggatggtctgagttagtatagggaattgagctgaattggcatattgagaggtttgcacctgttagcccctgtcaccaggatgtgcaacatattttgctgctcagcggacttgacctgatccatggcttgttgcttcggcgagtttgttgactcggcaattttcttgatatcggagataggggttaacgtgataagatgctcaacgattgaagctgaggttggagaggattttgcgcgttgtcgcaatggaaaagacacgcggcaatcagcagcacctgagatgaaatgaatcccccgaagtgagcactgtcaatgtctcttgtcgaaaatccaccgaacggggaaagtgcccatcgcacagatcacgtgttcaactttaatcttatcgttatcggattcgtagtccacctggacgggttgttccaaggttcccgtcatactcgcttttcacgttttatggctgagatctgctaaatcttacccaaatgtcgtgcagctggcatacaggaagccatggtagtcagacttgagcggtttctcaacacaaccggtttcttcttcttcgctatcgtccttttctgcctcatcctccttacaccagcggacgccatttaccaatgctacgagactaatcgactcacaaacatcttcttcattaccggcgcatatgtgatcaccttcctatttgcagtcctcatctatgcgacacgcatctacacgaatcgcagtgcactcaccggcatacccaaagcctggatccccgtggaaaaggaagatgtgaacaagagcgttaggcgactggtaaaggaaggcctcatccgtagcgccgtcatcgcctatcaagcccgcccacgcgacgtctccaccgatgaggacagcttccaaaaatacagatcgcttctcatcgaccccgaacgacccccatggggccatgtcgagcaccccggctggtcttcgccagactcgccagacttaccgaatctaccataccgcacagtcatacacgaactccccagcttgattgaagccaaagctgtctcccttgcccctattgattcattatcatctgcgcccacataccacttcgatccgtcaggcgaccttacgatacagtctctcccggatacacgcgtggtggaagtattacagcgtccagcgtcaatgggtctgagagaatatatccgccatctgacgtccctcggggctatcaatccgccagaactcggtgcggatttccttgcgctgtacgaacaagccagattctcgacgcgcgatctacacgagacggaattccgcgacctgatgcacctcttcgcggagattctgagggggatgacatcccttgcaccaccgatcctggatgaaattcgcgacagcgctagctcccggcgagcctatagcgaatctagcattgaatcctcggatgatgagagagaaacagataccgggacttatggttatgacgggactctagggtacatgcgaagtaacagccttcgcccatcgaatacgtctacctgggagacccagtccgggtatgacactgcgcccgcaaggcaagatgccgcgtctgaattgtcaacggacagtggatcctccgtggcacgaagctttcttcataccccttctacgaggtctctacgacgcgtggcctcgggccaatccggcagttcgggagggagtgttattcgtctgaggcagccacgagatccgacagatttgccgtatacaattgactacgctggacgtaggcaatgataataatccattcacacttgtatattacctatagagcaacgctatttggacacgcaattgcgccaacggaaccttggaagtggggatggacttagtcaggcggaaaacattccgagtcctgtccttggcaaaacctgcaaaatgattgataagatcagtttatcattcgacgactcgtcatcagaaaaaagagtccaaactagcagatcttctcctttttcccattgttgaagaagatatccatatcgtgtaaaatgcatctctttcgccgcgggacttcctccctctttagctcctccaatgtctctgccgcctcctccaggaccgacatcaccaccgacgctgtgggtgacaataccctcgctgcagatggcttccaaaaagtctcgtcgagcgataagctcttcaaaaaggtcgatccagtggtagacggcgaagactgcctgcacgactgcgcgacatgtacgatcaaataccccgcaaaattcgatgtcgatcagcaagacgaactatacggacaagtcaacggatgggcgacacatatgctcgtcgcaacgggcaagtcagattgggtgagagacgtggcagacgagaaagggagcgtcatggaagccattgaaaagggaggactggagccgagcaacggggtatgacaatatcccgacctgccaaagtcaatgacatagagactaacaaccccttttcacagcgactcaaactgtcagcatccaacatgcccgtcccagacgaataccacatagccgacgcaggcaaacagcccacaaacgtcctcctgctgccgagcttcaccgtcgtcgaggacgtcaccccacagctagtcccagatttgatcgagaatttcatcaaccggaccctaacaacaacaacgccactaggcgcaattccagaaaaaccaacagaggaagaccaagaccaagaccaagaccctacgcaaatagacctcccacacccatccacaacatcaatccccacttccctcaaatcccaccccagcccgcacgcagccgtaatcctgctctgctcgcaacgcacgcgtgatgcgcgctgcggacaatctgcacccctcctgcgccgcgagttcgagcgccacctgcgcccactcggtctgtaccgcgacatggacgaccaacggcccggcggcgtaggtatctacttcatcagccatgtcggcggtcacaagtactccgcgaatgtgattgtgtaccgccgccgcgacttcgattggtacaagcgggatgctcctgcggacggggaggggcgggcccctgatgagggtgcggcgcagggaatctggctggcgcgtgtgcggcccgaggagtgtgagaatattattcgatatacggtcttgcaggggaagttgctcaagcccgggcagcagttgcgggctgggtttgatcgtgagcgtggggtgacgagttggtaaagttcgagctgggttggttagttggtactttggagttggtttagtggatatcacggacatattgctattctcggctgaggttgattgcctgatgtatctgatttgtgcttttgtcttagtattctatacatgtggcgctgcgccccaggtcagatctgccttgcgcatcacgctaatagctttactccgtattcgcaggctctgtactccgtattgtatttattattacgattgtacggatttcagaaaagaggtgtatgctggaggtatctccagtctcatcaacccttggccttgtttcgcttcccgtgcctcacaggatatcattcgccacttgactacagtgatatctatgtatacttctattagatgaaacatctaccaacgccgacaagcaatcgatggctatagctgctcaggctccagacacgtgcaccatgtcagccatgcaagtcagattgcaaggtcggcatttgtcagccctacagccatatcaaccgcaaatgtcggatctccctgtcttattatagactataactagtttgttatgtatgaaaggagacagacaccttacgtaaacataaccaagtgattacctaacctcccacctggaccgtgcaccggtggacctcccgtacccggcggacctcagggggcgtgctcaattttactcggacggaacaccactgtatcccaaacatccaccaaaggattataaagccacgctatcgactgtgctccatagcacgttagttgcagcaaaggcgtgcatgcgtacccgacggccgagacggccctacaaagaaaaacccatagaaaaacgtcatccactgcgaatgagcaaggttcattgcccatgactggactggcaaatgatgcaaggccaaggcaacaccagccgctagttatccctcaaccctcgggtttctcgctcgccaggctccaccgggcttgtttgaaagtaacctgggacggtcattgtacagaatagagccgatgttcccccgtgtgttgcggttatcaacgcccccttgcacggaaaacggtgggttgcgggaatttcgtacatattgttgtcttatttttgcgggggaggacggaatcagctccaaacgccaaactccaatacgtcatttctgggttttctttcgaggtatcttgtatcttctatatttacatattcgtgctagataggagctcggagatagtgtctcttacggcaagacactcccgggcgttcagtaaggaggactgaattcctttgctgtcagccgtgataggggcttgcggtaagttttccgctgatttgatcacattcttctcttcttctcactggcgttgttggctttcagaaccaacatgtggtgtctaacttcgaaaccagagtcaaaatacctgcaaggggtcaagtggtggctgttcgccttgtcgcaacatcctggccggtaagttatcatcgagcgctgataggcaaagcccggcgttgaccgacattcgcgcaacgagagcgagagaatgcgaaatggcacagaagggccgagaaatgcgaggaatttgttccggcctattccactccggggatattaacatcgatcatcgaccgtacgcacgcttggagaaaacatgaccacattcataccgtctaccgcctccttggtgagaaagctcgcggagtaaacagccagattgccgaatcagaatccacaggtttcttagcttccttaggtctaaagtgggggatatggatagtccaatgagctgctctcattactgcgtcgccatgcgcgcgtcggagattaatttagtggcttttcggagcatgtggaggatatttgttttggtccttggagctggtaacctttttcccaatcttcacatgggtataggtgatcgacatggagatatgtccgatctgtttatttcacactgtgaatccgttttgattggactccgtaccaggtactccgtacattcgaatgattcatatttcgtatacgaccaattaccaacaattaccaacgctgttagcggcagactgagggccaaatcagagagctccccgacagcgtcatatcctctcttaatcgccaagatgaaacaaaatgcggggtagtcagagcttctcagatcaagggaaataggtagaggaaaaagaaaatagcgaaaattagagtcccttatcgaactctatggtaaccgcttgaaagccattgtccttgcgtgatgtgatgcgcatgcagcttcgaacagctttgcaacaacttccgactcccttctcctgcattttacctatttcaatcacctgggcaagacggtggagttatcaatatccaaattccaaatatgatatggcccccaaacgagcccgtccctatttggaagccatccactccacaaataagactagtcttagtagtctgcacgcgagaacaaagaatccggacaccaggctcatgggtatctctgaatgacgcctcatttcttttatcctttatccttttttcgcatgcaagcacaccggtttttgattttctcttgccctactagccgcgccctgctttacggcattactatagtgtatggagtatggaaatatgcatatatgcctcaagtggagcatgcatgtgctgtacctacctgatcaccctacacttatcatagccgagcgattaccgtttcatgtagcgtgtattcagggaaccgattaatgatagtcgcggtttatctatgatcggcggcgacattggcgctcttttctgatcgggggtttctgttcgatgtttcgtgttgacaaatctggacccttagggaaatagtgggctgtgcaattttatgtacactatacaacatacaatagcatttctcagtataatctccattcgttcttacaaccgtttatccccataattcatttccaataatattttgattcctatgtcatgttcgattacctcaatggctgagccgggctgtctccattagccactcaagagcatttgtgtgggtccaatccacacattctgcttgcctcgtacactgcgtgcatcatcacgatccggatatgcagcactattggtccttcgaacgagatctacttcactccgcctaccaagtaagctaccgcaacagatctgcacacgttaggcgaagctcttcgaagtactttatacatccctccataccttgtaaacagggtttgtcgatcacgcaaagcgagcaagaagtgaaaaaaaataatacagggaatctataggtcggtcctcattactctggtgtattaaggttgtaagatcagaagatcaccgcagtgaagatgagcgcgagtggattgccacgttcagtaggattaggaaggtagtggtggtcacccaaacgcctcttctattttcgttcagctgttggactttgccaggagatctctagcccgctctggcattttcggctctgatcaccgtagttgttgcgcgaatctcgaagcctcttgcgacaccttttgttgagtttatcgattggcaatggggacatcccgcgctaaccgagtctacccgataagccttgtgaggcgacatgctatctgttggatgctgagatggtttcgccactggattttattagaaccaacatgagaagctaagtggtctatacagcagactttgggtgcgaagggagctaagtgatcgacccagctatggataaaaagcaaatattgtgattggcgctacgggagtacggtgagagtagtgcctgttcagggatagcatgggtatatcaaagtctatggactgaccatgtgaatgtagaagtacaacatataacatataacatatacactacaatatacacagacacagacacagacacatacaatttagaacaagtggagagacgggaacagccccaaccttaagggaatgggacccgaggccttggggctgttcggggtggacaagcgggagagctggggtacctgacccatttgcgaacaccgttacggggtgcagacgccgcgtcatagggcatcccttgcatttgtcgtttctctcttactgttatttacttcttccgagagtaatgttgcaagtgtttttgtggttctttgtttatggagacgcggatattaatggagtccttctagaccctagggaaattacttagtacggagttctgcaccgccaatcccattgacttcctggagaagatcgtttttagcgtcggtgaccttactccgtcgtgaccctctctcatttggaaactagatcggaggagttcggccgcggctaaccttgggaaattggcttggcttgattgtgtaagttgttatttgggagtcgttgagtggacggattcccgagcccccccaatgaatggagaggtacatagtacggagtatatatcatctacacaagttatttggtggcttctttagaagtgtaattgtatacagtatatatttagtctcttatacaatattatagtattatagttaactagtcaccaagttagttaggtagttcgatattaaaggggccaagaactggtttcaaaaatacggtcatatacaccgtatccataccataccataccatgcccagtccggttagcatgtcttgtcattcgggggccgaggtggggcatttggtaaataagctggtaatgtgggggtttcttttttccatgggctatcgcaatttaccattttcagaggtatcccgttgacagtcaaagtttgagtctgaaggtttggaaataaattacctccacaggtattagacggtttgccgatgtgttaccctgtcgagttgagacatgtatttctttgtacaaattgggaatgaattagggaaagagagtgtcgagctaggcagtgatatttaagctgcgagctgataggcctgttcgtatataggatatatcaacgagtgtacctggtacctcagggaaataataatataataaataatatatatataataaaagaaaataataaataaccgatataaaaccaaaataaaataaatatgctcttctacggtcccatccgcgccgtttttcctcccccttcaaggttatattctaatacttgaggctcccctcttctggatcttgatctctgtcagcgcatttcgtttatattatgctctgcgttcgcaacatcccggctaccaatccagcctgaccaaggatctctttctctgatttcaaggtcgtctgcgatcgcatatgcgcttacgttctttcccctccccccccctcccctttgtctattacctggctttccaagtccacgctttagctattcgcgctcttgggtctcatcatggctccaggcagtgggcgcgactttaactgctcgtgggagcattgtgcgaaggtgggtgtatctccgcgggctctactcgtcatcctctaaccggtttagtccttcaatcgcaaatccgatctctgtcgccattatcgcattcacaccaatgagcggccgtatcattgcaccgtaaaggactgcaacaagagctttattcagcgcagtgccttgaccgtacactcgaggacccacactggcgagaagcctcatgtctgtgaccatgaaggctgtcagaaggcattttcagatgtaagggcttgaatctgtatgtggcgcatttactccatttactaatttctatagtcatccagtttggcccgtcatcgccgaatccacaccggcaagcgaccatatatatgccacgagcctacctgcgaacgcaggtaagtactctgcgtggaaagtcgacagcgctattctaattgtcttgttgaaactgcagtttttgtcgcaagaccaccctcaccaaacaccaacatcgctctcaccccccggggagcttgacccgaccatcctcagaagatgcgacctccgagcactcgtaccaccaaacacccgtgccggtctcgggcccaggtgagcagtacatgctcggccagcaaccgtattacccgcaatcggcgacgccgagccatgagtattactcgccacagagtgtgccgatgggctccgtgccggttcacgaaactgcccctccgatcgtgccgcagcctgtacctggatcctcgccggtaaacatgccacacccgcaacagccacacccgcagcaccatgcgcatccgcagcaccagcaccagcagcaccagcagcaacaccaacaatatctacagatgatgcaacagcgttacgagaccagcccgcgcgccaactacctcccagaacaataccaacacccgtcttttcaaggccatcaactgccacccgaacaaccaatgatggtttcataccacccaaactatgcgtacaaacccccaggctcccgtctcttgaaccaagccgaagggactgactggggctttttgggagtaggctaagacgagactccacctagattgtggacccaatgcgtgtttaatgcccgttacgactttccctgctttctccggctgtgtctttgcttttttttgcagatcagaaatccgcatatgtttgtttctggttctggttcctatctctgctccatttctagggttcggcgctttgattatggattcccccttcgatattatgttattctttttctatatattgtcattttaaacggaggcaaaggtgttacccttctcggcgaatcatttttttttgatacctgaacatgggatgtttttttctttcttcttttttctgttctattccctacccctgcgtgtattggtcgtaagacggtcattccgatatcgcccaatgatatatcagcagcagctagttgtttcccaggaatattactgcgatggaaactgcactctgattggctccaggacttagcctttgaacagaaatcctttccacatcgtatattcacttctcttctcagcctctcatattatcctacatcctcaaactagtcctcgaactacggagtacatagttcatagagcatcatgtctgattgatcgaaataaattacatggcatgactcgtgggcttctcgattccttctgttccaaattcttttcttttttttttttttacacgcggtggccccattttcctcggaaagccaaggacagagccaagggccaagggaaattcgaggagcgcaaccctgtctcgctaacaaagacgttttttgtcgcactcgttttcgcttacccttctagaatcggtgacaattatattgattaatattcttttttaggaaggacacttcagagatctagaaaattatttccatgactctctactactgtctaactacaacatatctagtcacagtatcatgatacatttgtctgcctgcaacaacacccctgtagaatccattcggccccttcgcatccccgagatcccgaatgcaacagcaatttgttttatccctcaaacatactccgtagttacctactagatgaatcctggtggatatctcggtagggatctatctctaccagactactccaccaaagcggatacggactagttccctgctctgcatagttattgagtaaccgatttcgattcatatccaacgttgcactctgtctagaacaatatcgccactggtagcaaatcaaaatatcagtcgacagctccgtgggggtaccgggtccagaggagtccttggttaactagtgtgttagtattagtgtgttagtttagtgtacatggctctggccctggccctggccctggaaaggccttgtggcgaacaggaaaatttctctctttttttttgaacaagggtctgtttgcctttgccgcttctcgagacgagacgagaccttggtgagacacctgcgtaccagggagtttgtgtaggtttgcttgattgtatacggggttgggttgggttggaaggtacgtacaaggtacttgggattcattggcatagagatatatatacgacgcagccaatcagaatcgaggaatggaggggaaatgccaggaagtagatttaattcgaatatctggcccaaaccactgaaataaatgaattaaaagagcattcgatcggacgagtatcccacgccattgtacgtagtgccaaatatcgacatccttctattcgactatcgcctgcagcccgaaaccggttttctattgggttgtcaggctactgtaaggctctcaaactacaggcggataccatttccgatttgaaatagaatggattactacaacctctcctcctgattgtctgccgttttacctccccttttcgttttcgcggagatctctttccctgaatattcaaacggagtctccggacttttgggcctagacactgatgcagatccatacagggggggcagggggaagaggggggaacaaagccgtccgagagtggggagattaaaccccggtgaacgtgtggaatgtgaaagggccggtagatcccgcctccagaaggatcaccaatttatttccagccggaggagaataaggacacaaagacccggcctgtcgggccttttcccggcggactggatggtatgtatgtatgtacctgcgcactgttccggacgctactactctatactactctataatctatgtaggtggacgcaaaaagcctcatattacttcgagccgaggtgatctacgatttatctcgtatactagtaacaatataagtgcctccgtgggcgtttcctcgtgtttttctcgtgtttcatggggtcgcccctcccgcatgcaagtcacaaaactaactacgcaaactgggcgttgtgctagccttcaaaacggggtctggtttgactagttgtctccaataccccccaatcgtggaggcttgacggggtcccgagagttgttcatctcgcttctaccgagtaccatctgagactttaatttactgatcctagcctagctactccgtagttagtgatgtatactagtattcattttatctccctccaatcgatctaccaaatcacaaagtggcgctcccgtcctgcgatggggcccaacttcccgagtcgccatgcaataactataatatactagtattaagtaagtaaggttggactccgtgctccgtaccctgtaactccgtagaacatccgcccggcgaatgcaaatccagacttcggacgatgatcaggactggaaatggcattgggcgggcgtaccggagtttcaagttcgcttaacggggcagctactcccgtgggcgcatatacattccctggcaagactaggatctaatctaatcgcttgctggggtatattgtatgtatcaggatatggatgggctgagacggaatatgagcgatggtgattggttcaatcttgcgtgtatatggtggaagactcaaattcgatggaacatgcaatcagaaaacgaaacaggctgattcaccgaatcgagaaatcacataaggcatgatatccagcgactgcccaatccaagccaagccttttttcctcgtatcaggctactcggccttgatttttctccaggggcaggcaatagatggaggacatcatacgagcgacatcgaagcacagcagtatttttgaaacctattttgcaacaagcgcaataccggagcagagagaaataggacaagaactgcaagcctcaagggttggaagggaagagctatgcgcaactatttccgcttgtgggttgatcggctatggactcatttcctgattacaatctaatagttatagttggtataggagagtaaataagtactccgtactccgtaataagctccgctgtgagatccctagggtcggtcctaagagtcggtgtgggggtattctctaacggcgatctaagggggattaggaggatggacccacccaagctggactgccgtgtgaatattcagagctcgatacataatagttcgctagaactaggaataggatgtgtagttatcatggatatccttatgttgtatattgtatatggtgtatggctactgaggttctggataggaaaatagaagacgacacagaatgttaactatatagctagtgtcggagttaggacataggctatttcctattccgcactccggagtactccgtaaagcaaaagtaattaattagtaggcgccgttgcacggagtctggcttgccggtgttgacgcggggtggagacgtcagcttttaacttctttcctaaaggggtatgtagtgtgtaagaacccctggtcgggtatttatctgaatcggggttatttctaacctatcgaaaggaagtatgtaaatgatatacgtacttgcattctataatatactgtatactctatacggtaactacaatatatactatatactgtatactcactatgtatgtgtatccaaagtcaggagcttgggccttcgggagcaccggggtacacggcacagaacctggtaggtgcgggtatggtattgtcacaacgcttgacattgcggacgctatggaccgttcccgaaggtccactggaccccggtactggtgtattggaacggtaatccagtatattatcgtactgaataatcgaccgaaccacattggcccaaaagcaaacaggaaagaaacacttggcaaatccacaatgtaacctgtcgaagacaattcgaaactcacctcttagccggtgagtttctggttccatgtggtccccgacaagacctgcaccgtctacatcgggcatggtaagaaaagaggagtccaaggagaagtggagtatccagttcgattccattatacataatgtgagaatccccaactcatgacatattccgtctggagtcagactagcctgatccatgagacctcagaaacaagctttgtggaatggggtagaggacgcgttcatctcagatcggggtctatccaatgagttggacgcgaggtcgtttccgaatcgaggtgatgtccaggtacaatgaagccgtgggtcggaccttgaaatggtaagttggatacgagcgatcgacggatttcagtccgttcgggtatttttgcggctcaggccgatctcaaagttcgaatttggttttggaaacgacaatacaccgaaaaaaacaccgaaaaaacaaatacaattgaaattaccgctcggctagaaagtttcgacattctaaaattatatcttctggaaaggagttcgatgaaccagagttcgtattcaaggtatgtttggtctagattgcgcgggatccatagatcagcatcttaaagtgaagctatgtgtgccgaggagatacaacatagacattctgttacatcagatcaacccactctatctggttcttccaccctaaggcgtgctaaccagatctgcttccagatcggatcctcgttttatacggtttctatcgtgacacgaagtcgtcttagtacgagtagtacatgtccgtcaatcaagtccgaatacaaacaaatcatcacctcagcaataaaatacaggacgccatagttaactaactagccatcccgcaattctcacagatgccccaggcactcagcctaaccgcatctggaaactttagacgagaataccggcgcctatcacagtgcctggggaagtgtgtatccgtatcatgtccatatccatatccacctgggcgtacaataacttactcctatcccgtacagttgataataatatagttgatcttagtgtacgacgctggtaacggctgcgtttataagccttttttcgtgcgacgtcatccgggctggataaagatgttgtaccatgtagaccaggttcctatctaggaatagctatcctggcacagatacaagatgataccagtcttgcattcccgaggtaaaggctgatcggaggtttttggaaatgggggctgatgtggcttggctggggaaattgggtagctagttaaggctctcagtagtcagaatgtcagagtcagaatgtcgcgagcacatggtgaatggctttttgaccgaggctggctgggaggagattgggccgttgcgatgttgaccacccctcctcggcttgaacatgagcagatacagtagttacgtgatatcggtacttgcgtggtacatgcaatggcgacctcgtgttccgttatgttaggtatggttattcgaaaaaagacaagacgcagtctgaaatatgtgcatgaatactctaatgtagcttctctaagcctttctataaacccccttccagctaccagccgagctagcaagttggtgttgacacaaaaggtgaaagtaaaaggcctactcatccgcaacggcaacctcagcatcccacttcggcgcgcccatcagacgagcacgcttaacaacacgctcaataccatcaagaccccgcttcaacacatccatcttaggcccgtagctcagtcgaacgaagtggtgacacgggctgtcgaagagatcacgacgcttggccgggttcaagtcgaagaagataccaggcacaacgatgaccttctgggtcagcagcgcactgaagaagttcagaccgtcggagatgttagcctcctcaggcagagggggttcgatggaagtcagatcgagccagacgtagaaggtcgcgccggggacgtcctggacacggaaaccgatatcgtacagacggcccaggacgtaatcgcgcttctccataaagtgctgctgcagcgccttcatctccgtgcgcaccagccacggctccagcatcgggatcgcggcttcttggaatggcacgttggcaccaccgtcgaggtacgatcctgcggaacctagggcgtcgacaaaatccttgggtccgaccacccacgcaattcgccagccaggaaggcggaaccgctttgtgagcccatcgatcaggagaacgtctgtgggtccggttagcccatgatcaaaaattaggttttcggcgcgggtatcgtaccatccttgttaacgtcgacaacgttcgatgcaccactgattgttgttccgtcgcagcccgttgtgtagttgtatccgccgtagaactcgtccagaatcagagtcgcgcggtcacggcagaggtcctgaatttgttgcagctcgtcttgcggcatgaagtggcctgtggggttacggggattggaggtcagcagcacctgggtaccacgggcgatttcctcggcgatcttgttggggtggatgtggtagtggtcctccttggaaagaggaagggggatgggcgcaatctgcagggaatcagtaaacggcaacatttcgggctcagctcttctaacgcacgttcttgaacagagacaacatctccgagtacgcagagtaatcggggatggggaaggacagatacgagtttccgagaatggcagcaatgcgaatcagacccgcgcggccacctgggacaatgcagacattctcccaggtatactgactctccttgccctggcggtagtggtcgttgtacagacgagcgacggccgcgcgtaatggcttgataccggcggtcgggccatattcccgggaagcggatgtgatgggaatagcagttgggcgagggaaacttccctcgatgccgtcgtcagcctcgggggctccctgacctagattagcccagctggaaggatcatcggcgtagccatgctcgcaggctcgctctgtgcaccagacgacaccggtggaggcacgggaagcgtcgagaccggcgtggggacggtgaccctcgtgagcctctcgaaattgccgatgggtttctgagttgagttctgagggtttccaaagttagaaagctagaaatgtcagaaacgtgtcattgcataccgttatccgacagttccttcttggccgagggattgcggttctcggacgggcgtaggatgctcaggcggcggccggagaacgacattcttgcgagtgttctggtttgattataaaaatgattacagcgcctttcttataagaaaaatagggaactctcggaagtgggaggggcaaaagtgaagaaaaaagtcatctgcagcgagccgggtctcttttatagaaggacgcaaaggccgcttgccaacacatactaggacgagcacaccgactcgactcctattcataattccctcaatcctcaggggcaacaggcgctccgcgcatatattaatagcgcagaccaatacggtgtgatcttgagatatttcctatttagtcttttagtgggcgatcttccgaatagtagccgggagtgccggaactacgtttcgggtatcatattcagctgctactataaatatagctattcccatacagagctatagcacagagctatagctactccgtatacatcgtagctgtacggagtagactaacctggccttgccaagaatatcggctatccgacctgctccggcatcccgatctgataggcatcccgatacggattataggtctggtatagattccaccggaaatataaaaaaataggcatatacatcatatggaagcttcgtacgttcgtggacattgagatactagtagatcagtaaagagataacaatccgcgaaatgggaacgcaaaatcagaataaaaaaagaaacgggacgtctttatcccttcacctcgtcaccaggacatcattcatgccgtaaacaaatcattagatgctcgcctggagacgccacagtccaactacatgtttgccacggcgtggctcgctgaaagtcacaaagaagaaggggagatagaaagaagtatctcccccgagaacggctgctcaacagtttcaggccaaatccagttgggtaataagggtcaggatgggagaacgagcgccacaggcgatgcaaagcattgaaacgacgaggatcaatcctcgccggggggaatcaagggagggtattaagtcaagaatgagcggaaagcaaacaagaaaacgaaggatctaatcgaccacctggcagtagagttgaatctctcccaccaagcccttggcgagcatatcacgatgttgttcccgccattccaggaaagcgagctggaccgcctcgtcgctatcgatcgtgacgaaatcaccgtcttcatcccggtagcgcagccggacacttttgctcccgatggatcgatcagtgaaccgagcgagtttggcatccacgcggtccgtcaatgaccggaacataatgttggtcgcaattaccagcgtgacatagttgtcctcaaaattcaccttggccttgagttgagtgggcatgtagtctccttcctctggctcttgggtcaggggcgatgtggcaggatccgagatttgcccagaattgcgggtatcattatattccggctcgttaaagtgcgtcgtgtggagttggggctgggtacgaatggggagctgggtgttggtgggcgaaccgttctggctgcggttgacgggggttatcatgttggccatgtgcgcagggatcgggggcacggggacattgtcgacggtctgcatagtgtgcactcccatataacgccgtgactccggattgttactgtgatgatgaatatcagggctactagccgatcgcattcgctgggccatgccatttgcgtgagactgcgaggctgagagtggaggcaatgacggacgctgagcacctcttggaataggttgaggtgggaaatatccgccagaggttgttccgtcccgcgatgttacacgagacaacgctggtgctgtgtagcgaagggtatcctcattccagaccgatgattgagtggtggaattggtattctgacgactgaaggagaaccctgcggattgagaactcgatcttgtggaaggagtctcagtcgtgggggaaaagtaggagcttacgtttcgatcaccgggggacatgcttccgctcccggggaactgagtgtgcagcgcaatcgttggatcggttcccgcatagcgcggtcgggtattggggtgagcagcagagatggagctgccattggtggcagatcggtttctcagactagtactggacggatttcggctcatggggaattcggattgatatggatctttgttgctggcatcatcggtatcatactcttgttgataggggttgggaatgtgcggcatgccctccatgtacgtgaactcgctgtcggatgtaccagtattgcgcatagtgcgtcgctccgcttgaatcacccgttgggtgtcaatgtccttgtaccaagtccgcatggtgttctcgttaatatatcggatgataaaattgtcaacgacaccagggtctcctttccagaaaatctgaatacgatagagtcctgtgtgaaccgattagaggtatttttcttaacttaagaagccaagagtgatccttaccaggcttttgaagacaaacaatatctgtgacgttggccatgtagattcgacctttcagttgaagacgagcctttcctttcgcattcaaagacggcttatctttttgcatcataagcttagacttttgcttgttgggattgatatctttgcaacagagaagtattcgctcgaagagatagatatggtactaaaagccatgttagtgacgtgccatttcgggaaacaaaccataggatcagacagtacctctctttcgctatccttaccactgtctcccttgacaacttggaaggtaccaaatcgaagaagatctccgaatgactccattttcaatgctttccagtcatccacgcgctcggataaatcaagtaccgccgcagtcaaatgttctttgtggattgcctcgttagcaaagtccaacacagtctggatgcaattgactgcacgcgtgatatcggcctgcagttgctcgtcttctaattgtttgcgtagctcctgaaaaggtacagctatattagctcgttggtcttggacctagcattcagcaaacttaccaaaagcatcagcgggtatcgagtcaaacgctggaagggtttcacaaagaatccattgagcgttttcggctgagcgaccatttgctgcagatctatatggcgtggcgcactttggattttgtcccagtccttcatacaagcttcatcacaacgcatctggttggcaatgaaaggctcatactgccggaaagcatcttcatgcaggaagaaaaggtgaccccagttctgcatttcttctggcagggcgtagtgctgctccatgcgaatcaggaatcgttgggcaaagtctagtaggttgtttaaattgaggaaaatctgatggctcgcatcacctgtcaaagcacctgtctcttccagttccttcttgagcgcttggagattctgcaggtgatgaacataatcacgctccgtctccaaaagttccttgaggatatgctctcgcttggtaagcttcacattggttttcgcgctgggagcctctagaacttcggattgctttagttgaccttgcatctcgagtatgtctaccacgcggttgaccattttgatcactttgatgaatccagtggtactctcgccgtaaaggtcggtgatcaaaaagcaatcctgctgagggaatgccagctcttgtaaacaggcctgtaggaacttgaatgtcgccgctttgggacgcttcgcctcagttaccttcccagtatcaatttccagcggctcgtcgggaccagatgcattatagatgctcaatagtggatagccatttctgagacaattccacaaggaagccaccggatctgtatttcctcttatgcgatcatcatcatccatctcttgcaagtatgactcaaaattgggaacttcggatagccgtcgcctcagattgacacagctctggtagatcgattcgccaccacggcggttgatgatgttatcctcggcgaccggagcgccgctcatggctgaagagtcaatcatatctttcctcgggggccagatatagatgagttagaccagccaggctcaacttaaatctgcacagcagacccaagagggataggttcggaaggatcgacgggcgtcggaagtggagagatgacgatcatgagttccccgggggcgtaagctgcgcggcgcagggggtgtcaaacgagagtttcgaaattccgacagcgatccgatcagttgtcgtaggtgtgatttttgaaatatacagatcccgggaagcgctctcgagatcagagatacctatatatttgttcgaaccaatagcgcgaatatcaagtacgatgcaccgtaacttgaaaaggaggggctcgaggagtataatccgaccttcagccagccccaatcgatggggtttggggattcgagtgtttaaaggaccgctgcagccgggcaggcgagtcagatcaggtaaaagagaatttggaggaacacctttgcgaaagggccagtcactaggacacgacggaggacaatcgaagtcccgagaaaaagggggcgcacggaataataggataagagaagccagaacaagaagggctcggtagttagatgaagtcaataaccagaacgacaggagcaagcacaacagctgagagttctgctgatggaacagaggaatagggatccttggggccgaaggagtctggtcagtttcctcaaaaggtttagcgtgtgttttatggggcggtgtggtgtggagaggggcagctgtgtcagcagccctccacctcccaaggttgggggtcagggctgggcagcctaggccctgggacaaggctgggaactggagggctggtgatttggagctggagagagctagggctggagaagagagctaagtgatgctggagtagttatgtacattcgtaccttttgtagggggcttgcatacaaaaggtacattcactgagatatatacttacacctgcactattacaacctttctgccctcaaacgttagtatcccctgtctttagcgcctaggaatggtccgtgcaattataagacagttctgattttgtcggttccctttgtgacatagcactatggagtatataatgagtgacctagttagtattttggaaaatgcaatcggtactatctttttctctctcacctagacatggggtttctctttaatcatagccatggcatgaatggaatatgctatatatactacgagttgttccccaacatatttctacagtaatagttacaacactacataagacattgaggaagcggctcattatggacctcctcgctcttatctgacacattgatcttctacaacgcttgcttttctcatgaaggagttagatacatgtagtcatgtaggttttgctataattctatgagaaatcctacggacacacccccgctagctacttcaggtatctccaccgctggccacaattatcaataatatatatccctacagtattctgaacacccgcgccatgacaccattgaagtacctttctatacctatttagagatcacctgatctacactataagataatctagattaacaagaatactagcagtctttatatgtcttttcataggcataaaaaagtacttcaatggtgcggtcgggttatagtgatctacacaacatggtggacaattgcggccggcggcggatatacccgaagtagctagcggggagttctatactcgaatcacgtgactcacgggggcaacaactataggctcttgaggatgactctgtatttagatatagactctactgaaattctacttttcttctgtctcgaatttaaatggaatatcttccttctattcagtttgcgactgaagtacgtgagataattgcgctctatcaatcaatctccagggctggtgggccttgcctcgtccaaacctgacgtgacatgcaccgaggccaacccatctgctcaacctccttctccttcctttccccacaaccttcatcttgcaaaggaccttacctcatttattaattttctataatctcttcacggaaagttccttgcaggatttcacagccatcgcgcgacgccattgatttcggcgttccattcatcagcccggcgcagacccctctgaaacccgcatcaatggagggcgagcccttgcccgatgctcccgatgccgccgatgctcgaatctcccctacactgcaattgcagacgactactgtttccgagttccccgcgctttctttgtcaccctcgtttaagctagatgaaggctactcggatgatactcgaagccaggccgacaaagacctgggatcggacaatgttatggcgcttccaagttggttgctcgcccagtccgagaccggtagagctggtaagattaccctattccccttgccccctgtggtaattgccacgagcgcgaagcatcagcctcttgctcgtcactttgcgattatccttgctaactgagggttcacgactcccagaactcgcatacagccttcttcggtctttaccaacttcgagcatcgcggcagtagttgatcgactcaacccaatcttccatattgacccatgtgtcaggcttcccccggaagtcacatggcaggtttttacctacctcgacgcccggacgcttctgaatgcttcgcttgcatcccgctcatggcgtgaacgtatccttgactcaggtctgtggaaattcaaatacatccacgaaggttggggcatggacacgggcgcaattcgtgcgtttgaacaagaacattccgaggccatgtcgccccagactcggaagtctcgcctacgacactcggaaccagatctcggggaacctaagcataaaaagcgcgtgccgtcgacctggctcaattcccgaagcgatgaaaaccaaaaaccgaccgtgtttggccctgcactcccggtggccgacagtgaaggtgatcaccacatgactgatgatgacgatcagactacaccttcgttcgccgacgacccggagttgattatgccaaccagtacctcccaatctttttcgccactgtacccacctctacgatcgcatcttctcattcgggataccgacggaagcgccaaggtcaactattttcatatctacaagcaacgcaggcggctcgaagcaaattggcatcaaggccgatacactaatttccaacttcctgacccgtctcacccagaggaggcccaccgggaatgcgtatatgcgatccagtttgaaggccgatggctagtcagtggcagccgagacaagactctacgagtctggaacctggataccaaacgactatggcatcccccgctggtgggacatataaagtccgtactttgtctgcaatttgatcctcgacccgaggaagacatcatcatctctggcagcagcgacaagtctgtcattatatggaaattctccaccggagaaaagattcatcaaatcgaagacgcgcatcttgattcggtgctcaatctcaaattcgaccatcgttaccttgtaacatgttctaaggaccgaactgtgaaggtatggaaccgccgagctcttttaccgaatagcaaggattatccgcatatctgccatggatcaggcgccacatatcctacatggataatagatttgaacacgattccaccgagtgttctcgaagctggcattgcgcatgatcaatacaaagtcctagagccttacacgttgcttatgaccgtggaaggacatggagccgccgtgaatgcaatgcagatccatggtgatgatattgtgacggcgtctggagaccgtgttatcaaggtctggaacatccggactggtgcttgctccaagtccttgctgggccatgagaaaggcatcgcatgtgttgaattcgacagccgaaggatcatcagtggcagcaatgataactctgttcgcatctacgatcatgccaccggagccgaggtggcgtgtctgcgagcccatagtaatctcgtccgcacccttcaagcagggttcggtgatgctccgggagccgatgaaaccttgcgtgaagaagcgatagcgtgtgaaactgcgtttttcgccgctcaagaggccggattggacgtcgacatgggtcatcgggagcaacgccgcaatggttaccaaccgaacacggcgggatcgcgggaccctcgtgatatccctgctctgggggcaaaaattccacccggtgggggaggtagtagctgggcccgtatcgtgtccggttcctacgacgagtcaatcttaatttggcacaaagaccgtaataacaagtggacaacggatcatcaactgcgacacagtgatgccatcgccaattccgctcgtgcgaaccttagccaagtggcaagaaacactgttgcggcccaggcccaggctcagcaattgcaagcagcacaggctctagcgacacttgggcaaaatcccaatatcaacccccacgctggtcgtgccaacccacaatttctgcctcctctggttatcaatgccttgccactcgctccacttcctgctcaccatcatcaccaccatggccatcaacgcagacctcaagggtcctcgacagctgcgagggtgttcaaactccagtttgacgcacggaagctcatttgtgccagcgtggaccctcgcattgtgggatgggattttgcctgtgatgatcaagatatcattgaggcgagtccattctttaaagggctttaatctttccttcgcctttacgctttttaatactagcacctgttcttcttttacttcagtgcatctcctgcatcgtcctcactgggcgcgaattgtgagccttccaatgaacagacggctcaattcacttgacgatttcctattattagcatccatgcgatcgcggtgtgctttctttgcctggtgcattactccttgctctcccgcttcctctgtctctctccgtgtcctcttgtcctctccttacccatcttctcaatgtcgtgtcatatacatacgatgggcccttgctttccgtttaatggtgcatttcttatcttgacttccatattaggagtcatttctggctatccaggtcacatattctttccagagtttttttttatatctcttcgatctcattattatctttcttgcatggcgccggtgtggcattctatccatagcattatgattagcatcaatcagaaaccttcgactaccaagtcaatatcattttatggatatcaagccacggcatactcgcctcggtttcaattggaagtaggccctgacaggtgctgttttatagtactgcggcaccaagtgctgcagcactcccgcagcactacagtaccgaaccaagattactcaggtagggcggtcaaccgatcgcgtacccaatcctccggcagaaaacggaactctcttacgtaagcaacaaaagtggggccgagagatcgacgccacgacccgctccccacttggcttctatcaattctatgcaatacaccgttccaaatacacctttccaaaatggcaaagagaaatcgatcagcttcaccttccaacacgccacatgcccaacgagctatacgtcgattagcaagagtatccccgcccacagcaccccgcggactgtcaacactccctacagactcactgaccagcttggagaaaggcgcccgggagcacgtcgatacagttgccttcaaccctcgatcaaccggaaaggcgtgacccttcattcggcgcacagttccaactgcgggacaactatcgctgtgtgataacgggtcaactgagcaccgatcaatgggagcacgaaggggaaccagtggtcacatgctctatatatggtgggctatatattggtgggacccagcagaagtaacttacctttgtaaactccccattacaatctgcctctacttttttcttcttcataatagcaactatttttctcgtcgttctcttcctcggcaaaatgccatctggggattcagctgtaagtgttgatatctccaatacctctctgtcagacttctattataaccatcatcctcattaataatttgttgggacgtttactgatagataaagaggcccccattctgcgatttctgtcgccggcgtggcgatgatgaatgcgacttctattacgtcgcgcgtaagacccatatactcatatcttaaatagaggggagatgttaattttaggtgacgaagcagactaaagtcccaaaccccgtaagctacgctacggctcccgctcgaaagaggccaagaagggcatgtcgtgttattttattatatcgagctacccagtctatgatacctcgcacttgcctcttacttgcctaaggggcctcatataacaccttttgcgtttatctcttggccaggcgtatccggagctccaagagatacatcaagcccctggatctaactgtatatgtatttccctgcgccacaaaaaatactgtcagcgaaggagattaatactcttcgcaacgggatcactcttcgagactcggtacatacccagcttggcaaatttacaattgccttgaagcctaccgtaagcaggcaatgatctactatgaaaccatttatactcactcttcttattaggacatgggaaatgagtacgaggtaaagacttgcaagtgctatcccgggctgatatcccaccattcccccgatcggcgcgtccgatttttaccaaacacagagtataagattccaagccccgcaattctcgatgcgcattggagagtgtgcgagatcttcaatgcatctgcgatgggagagaccattgaacgacgtcttcgggagtgggaagggttgagaggctctaaatgcgctattattagagaggacggtacgaccgatctcgctagtctgctggatatcgcgctatggggccaagtttccacatgaatacacgctttacacttctgtattagtatttggttaggtctgagccaatcttaggtttatgaagccaccttcaattaccatgttcaccactcttcatgtgagaataccggtgatcgatcaaagaaaggcaaggcacatctcgagcccactttcgatattggatctgtacaccattcaggagtagagaagcatacaaaattctaatcagggacgtactcaaatttactctgaaatcaaaaagcggcaagaggtgagcacttaaatagaaggggaaaggtctcgagtgccaggcattgtctggtacattccattgtagcaccagatgcaagatatgaaaatgcatttacaatgacatggcaagggtgcaaggagataaataaaaacatcaaaaggtagatacctgcacctcgttagacttactgatcatagtatatgtaaccgaaaaagaaaagaaaagaaggggttaggagccttagactgcaggaaaaagaggggaagatacgtgcctaggtagcttaggaagactagcagggatatcagtaaattagtaaattcctaccttttctgcatgcaatttcctgttttattttccctcttcattctgtatccgacttctaatattcgcaatgtcaagcgagaagttcaccgttactgagcatcttgtcccgggcagttatattagagaatacccagggagcaccgtcacgcaggaagatgtactgaaaattcatgtcaaacaatatacccccaaacacgaaggtcccgtcccagctgatgcaattactttcattgccgctcatggagtcggtctcccgaaggtgaccctgtctttaacctgataattcgtctcatgtgctcaacattggacacaggaactgtacgagccgctgtgggacgagctgctggaacgaactaatggcttccacattcatggcatctgggtggccgacgtcgccagtatgaaccagagcgggatccagaatgaggataagctcagtatggattgtatgtgcttcccattcgattcttgatacatctccccccatattaacaatttcctaggttcttggatggatcacccgcgagacctcttcttgatgatcaaccattttcgtgagcagatgccacgtcctctcgtcggagttggccacagttttggcgggaatatcatgtttgtgacgaataaccctctcaattttgagaattcaaagaatgagatactgatttctttttccagcacaaatcttgcctatctacatccacgcctgtttacaaccctcctccttatcgaccccctcattcagctaagccctccctcgatgggcttcggcaccgaccctccaggcccgatcaactacactctctggcgaaatgacgtctggcccagtcgcgaggcagccatacgtgccaaccgtggcctcatccacggctgggatcctcggtgcgtagatcgtatggcgaaatacttctttcgcgatctaccgacaccgctgtatccggatgtcgaggccgtgaaggcgcgctttgatgcagccgctgatactactgccactccggtcaccctagcgacgccgaagtaccacgagcttatagcgcaaatacggcagaacttcaatgcccgggacccgaccacgggccggatcgaaatcccacgagccacccatgccgatatggacccattggtggcatctattcccttataccgaccagaacctcgaagtacgttccgccgcttagggacactccggccttcatgcctgtggattgtgggcggggcgacgtttttgaatgtcgatgagattcatgaaggtgtcaagatatgcgggtcaggcatcggcgggagtggaggtgtgtctgagggaagagtgaaagaggttatcttacctggattggggcatttgatgccatttcaggagattgggactgttgtagggccatgtgtggcctggttacagcaggagatggatcgattccggcagatggagagggagtggggagaagagaggaaaggcaagagtcatctagtgctagagaagaactggtataaagtcttgaaaccaatgcctagtggacgtggcaagggtgggagaaaggaaaagttgtagatactagatggtcaaatgtctactttttcaattttatgttatcgagatatcctcgtaaaacccaacaacccttgattatccgtctacatctccacagatcgccttacattagcaatcaagtgaggtctagtgcacacgattgatatgtcgctggatgtatgccaaggccagggtggtcctggagaaacccagcagacgacatggcgagatcgacatccttacaataaccccgcttcccacaccgtttgaattatatctctcattctaaccagaagtttcacatcagctctttcatataccgtccgtttaccgtatgtaactttatatgtatgttgtagatcccaaacaaaacgtacattttcattggtccgtagcaagggtaccgaaatgggggaggttacccgacatatgcatgcaggtgacgttttgattctaaaacatttgtaatattgaatagttgaataatagttgaataatagttggataatagttttatatcctttacatgtatttttacccaaagatacctcggatcggatttcaacgttccgtccgacccaaattcgacggaaatttactagaacaggattggggcgggtgacctagcaccagtcacccgccttacaccgtattaccgccccaatatttacatgtacatacaacatacatggcccactacatggcccactacatggcccacttggatggaaatttcatacatacacgctaaaaagagcagagataaaaatcttttaatttaaacctcagtcgtattgtcaaaactagagaaacttgaaaagtactaggcatcatggcagtaacaacgaggcagaccaaaaacatccatggacagcccccaggttccacctagcgtcgactatacatcgaaagaccccgatttccgtttaggatggcatgtgagaggctttggtgtcgccagccacggctacaaatataataggtcatcttccaattttaacatgatattgtgtacacctttctcccatattctctgagttgaaatcgttcatcaaaagcaccatgctcaccaagtctgtgacctccatcctccaagggattaccttggcagccaaagaatttgagaacaatgaagctggtgcaagagaatccctcattgctcatagtagagctctcatatccgcccttgaagttccgagcgagtttattcaacacactttctggtctcaggtaagcctgatttggcggggtaagactcgaaactattgctgatgttcatatagccagcactgtctgctattatcaggcttgctgctgatgtcaatatgtttcaacacttgaaagatgccgcgggtaaggggatagattgtgaagctctgtctatgaagacgggcgttgatgccagccttctatcgcgcttggccagacatctcgtggctatgaatgtgattacgtttcaaaatggagcattccatggcacagacctgagcgatagccttgccgccgagaactatcaacactccatccgcttttgtcatgatgtgtccaggccctcgttcaatgaattcccggaattcttcaagagcaatgggtacaagaccccgacgctgagtggaactgatggtccattccaagctgctcataagactgagctcacctttctgcaatggcttgtcaacacacacccctatctgcagtattttcactcttacatgagtgtttaccgtgctggaaaacaaaactggtgcgacaccggtttctaccctgtctcagagcgtctcctttccggattcgatgcctctgtcagcgatgttgtgctggttgatgtgggcggtggtcgggggcacgacctcgagacttttgcctctaaattcagtcctcttccaggaaggctcgtgcttcaggatcgagaacaaaccattgctagcatgccggccgatgaatcccgccaatttgaagcgacggctcataacatcttcacaccgcagccggtcaaatacgctcgggcgtactacatgcactctgttccccatggcttcggagacgaggatgcaatcaagattatggcaaacctagtgcctgcgctggcgaagggatactcccgagttcttttgaatgagattgtcgtcagcgaggagaaccccattctagcggcaactaatatggatatgattatgctggcccacttggcagtgaaggagagaacagaagctgaatggagatatatcttcacccaggcgggattaaaggtggtcaatatatattcgtatccaggcgtggcggagagcttgattgaagcagagctcgcctaaacgtcaccaatttctataggttggctacatatcgaggaaatcagaatcagactcggaaacaatataggaaataaaaacccgaatcccgaatcggcaaatctaggcttcagcctcggaaggttagcgcatttaaattttcggttctgtggggccggcggccgcagccctactccctacggtatcccaagtttaaacctgtaacaaaaacgcgttgtttacggagaagtccgaactccgtaggtaaaaatccttctgagggattaaaccggtcattgtgggggtgtagatcatcaaaagaaagaaaacgaaaggcttttcgctaaaattcccctgccggagtcctctttgattggactacagtgtagtgctgcgatgaaagagggagagagttgtatttccagttcttgtatttcctgaagttggtgcctgccgcaccggactgatggtcaggtgacctccacatccaacaatcttaaaaggccgtccctcccctgcccctctgacttcctttgggaatcacccccccattcccattacctattagttttttttctattttttttttttttaaaatcagcatcatggtcgaaattctggattataccaaggctttagaagtactcaaggagtatcctggagatggcctccacgtcgatactctcctcgattcggatagtcatggagctttgacttacaatgacttcctgattttgcccggttctatcagtaaggcaatgaacattatctcataggtcgttctctctaatcgtacgaacagccttcccggcatcggatgtttcgttggaaaccagagtaacccggcggttcaccatcaaggcccctctactgtcttctcccatggacactgtgaccgaacacagcatggccatccatatggctctcctggggggtctgggtgttatccacaataactgcccacctgacgagcaggctgagatggtgaggaaggtgaaacgctatgagaatggcttcatccaggaccctatcgttctgtctccggagacgacagttggagaagcaaaggaattgaagactaaatggggattcggcgggttcccagtgactggttagttggatttctccttggtggctctttttctttttgtttcgtttggtgatccttaccttgtttcgttcatagaaaagggaaccctccactcgaagcttctcggaatcgtcaccagccgagatatccagttccacaagaaccacgaggatccagtcacggctgtcatggcgacagacctcgtcaccgcaccggcaggcactactctcgccgaagccaacgaagtcctccggagttcgaagaagggtaaactgccaattgtggataaggatggatccctgatctccctgctctcccggagtgacttgatgaagaacattcattaccctcttgcatcaaagcttccatccaagcagctgctctgcgccgcggccattagcactcacgacgcggataaggtccgtctccagaagctcgtcgatgccggtctggacattgtcgtcgtggatagtagccagggccacagcactttccaaattgctatgatcaaatatatcaagcagaacttccccgacattgacgttatcggcggtaatattgttacccgtgagcaagccgcggcattgatcgctgctggtgcagacggtcttcgtatcggcatgggcagtggctctgcgtgtatcacgcaggaagtcatggccgctggtcgtcctcaggctgcagccgtacgcagtgtatctgccttcgccgcgcgtttcggtgttcccactattgctgacggtggtgtccagaacctgggccacatcgtcaagggacttgccttgggtgcctcggcagttatgatgggaagtctgcttgctggcactaccgagtctcctggtgagtactttatgagcagtgaaggccagttggtcaaggctttccgtggtatgggcagtattgcggtcatggaggacaaaagcaagagcggcgctgggaacaacgccggtgcttctcggtacttctctgagaatgataaggtcaaggttgcgcagggtgttgcgggctccgttattgatcgtggctctatcacccagtatgtcccttaccttgttgctggtgtgcagcattctctccaggatattggtgtccagaaccttgatgccttgcgtgaaggggtgaacaatggaacagttcgctttgagatgagaagcgctagcgcgcagaccgagggtaatgtccacggcttgcacacccacgagaagaagttgtactcttcttgaatgcggcgtctctgttttcgtcgactgttgtctagagttccttccatctagtacaccagaccaaaagttagtcaatacactctttttgataatctgccataagcaaattgttgtcaagcattttgaaaagcctggaatagaaatctagtgattatacaagatttaaggggtacagagagctcttgaagcatattttttcaaagagtaaggtttatgaaattcaaaattcaaacacatctctacttggtcccttccatagcgtcttcaagatctttgtaaaacagccacttcgtctgcttgccgtacccttttgccttccaatcattgatagtcaaaggataaaagtccatattccctttcaaggtactatcatgagcaagaatcagaaatacattgtcgtatgcatcgagctctttgatattgtcgactgtcttcagcgccgcgtcgtaatcagaaggaagcacaggcgacaaggtgaaaacggattctgattcagacgaaagcggaatgtgacgagagtgagatggacaaggaagatatttggaaggccgaagaacaccggcatggtggcaggaatctccacccatgaatacgaatgagtccggcgaggtggtaacccgcgcgagggcgcctatatgaccaatggaatggcctgcggcatttagaagatagaaggatccgtcaccgaaatagtccagcgcgtcgaacgagcctatcttgatggcttccttttctgtcctttcgaaggagatttcccgcactttccgaccttggatgtccgaattgagattgatcgcgtccgggttagttgggaacccgggccagtggctgtcccggatgccaggaccgacgacgagctcggtagacagtgggaaagtggacgggtcgccgatatggtcaaaatgggcatgcgaccagataatggcttcgatgtctgtgctgcggatgcctagggacgatgcgtcagagtccagaatatccgagatgttgcgcgggttctggatggttgtctgtgatttgatcatggctacaacggatggcggaagtctttcccagtcctgtcgaactcccaagtcaaatagaacatggcgagtgccgactgagattaagaagcagtaagttggcgctgtcacctttctaaggcctggcagttcgggttgccagaatagatcaggtcgtaggtcaaggagtgttcctctgcgattattaggtcaattggttcccatggatacgacgaggtagggccttacgggtcgatcactcgcacatcgacggtcgatgatgaaggaggaatattcaagacaggtggaagagtgggcttgtctttgttactggaacctctctccattttcgcccgcttgcgaatcactgcttgtagtcccgtctgcttgaagaaccaagcattctcggttttgtagttctccgggttgacgatttgtatctggcacggaacaaattaggaagagcacatacctgaattgaagcaaagtactcacatcgtagttcaaaagcagtaccggaattaatttcttgatctcaaggatggcgatattcttccccagacaagtacgacggcccgctccaaactaaatctcaagattagtaagagtatgtctgacgtagacgaagtctagacccacagtcaacaagctattctccagcctcttacggtcttcatggctcagacctagccatctctcgggtctccattcgtccgcatcattaccaaaggtttctttatcccggttggccatatatgggctgattccgacaatggtccctgctggaagatatgtctcgcaaacagtcaaaccaccgccaggaacaactcgctcaaaaggtagacaaaatggaggatgcagccgtaaagcctccagaacgcacgcgtcgaggtacggcaaatctctcactttctcccacgagggacatgtacgagaaagaccattactgctctcagattccaggagctcatcttgcagacggctcagcgtgtcccgatgaactaagagattatacataattgtacgcatgacatttgcagtcgagtctgagccagccatgatattagagaaagtccaggctcttggggccctggatatgagttagccggatataaggcaagagatagaaatcgatcagcgggaagatttctttaccaaggcataacatcagggtttgaagcctgtatattgagaaactgggagagcatatccttctcgtctgaaacctcgtctttttcacgaggcgccaagcgctgcaatataaacttgtcgactacctttaacaccccaaaccctgtcggtgacctgaacaatgctataaacgggttcgtattacagaactcgtcaaaccacggaatttggcccatctgagaaagtcatacgcattagaaaccaacggtagcacgacgtgcacagagctagaacccaccacagaaactctcttcataaacttccaaatctcgcccaagattccattcatatcgcggccttgttcgaggaatccatatcgtcgagagaacgtcaatgtccccatcgaatcaaacgcaaaatactggagccagctccccagatcaaacggaacatcgttgctgcctaggaaccgaccatcgagctgttccaacagtaccgcgagggtttgatcgacaaatgactcgagcttcaccacatttgtcatggaatatagaggagcaattgggcttcgaagccttttatgaaggtcctcgtcttgggaattgaacaccgccggcatggcgcccttgtttggcgtgtagggcttctgtgtgcgataaaagtcgctctgggggtagcgatgttagcgattgaaatccaatcatgactgcacgcaataactctggtactaccatcactgaccttgggaaacccaggcctactagggtagatagccgggatggtgcgaggatccgagatagagaccatgtttggaccgaatcgaacggcaggcccatacacagcatgcatccgacggtggtattcatgagctcgtccggactttacccaccacacgcgttgcaggtttgtgaactttgcaaacaacggacctggtacatcttgcagatgcaagtatagacaacaaacgtagcgggtgagatatagcacaacagcaacagctgtgatacgtattatgatcagatagtccatagtatataagtttatgtcttgtacgtatacttgtgctggaggattgagaatgaaaatgaaatagactttcaagattgagatcaatcgtctagtatctattaaccgaatcatattgctattgatagaacaacaagctattggcctaaagggacagagtacatttgcacacacctcgcctctttacacagctggattgagttcgtatcaatacagtttatggaaattagatatttcgtaatctataggcagttgcctaatttgtgccttagtgcatctccacctccaaatctagaatgctcccacatatagccccgcgctactgcgtacacctcacgcgaatcgggtctatacataataacactccacaaaaagtgaagcggactaccccgcgtataatataacatgtgcgtgacattcaagcctttgcatatcttactgcattgtatacctgctccactcgaattcgatatcgattgttcgggcgatcgtaataggatgacggctggctgcccggtgtaggcatcttagtctacacctgcatatgggttcaagtcgataagactcaataggtagcccgacggggttacgtacgctttgtgctgatcgggaataacataccactccacatcccactccgcaaattatccataggtgaaataagtactagagcggcatacttcttacatgtaacgcttcatatcgccaaaagtctggcctacattgccaagaatatacaatcggatccacattaacttatcgcgcatatcgcccccggcctcaacgcgcattatacgagaagcattcgtggcagtgttagaaagcagataggatctcccagaattaacagaatgaattgatttgcaatcgctcttctacctttacgaaagtatcctagataaaaaacacgaaatatatgcggtgtatacgggatcctaccagtgaacaagtaaagggcagtatatattaagaatggcgcccatagagcgtttttggttcgtatttccgcactattgacaatccgaaagggacacctggcgccgacaggggaggccgaatagagcaaattcaaggaagtggcgaaggaaggactttttgcgacattacatcaactctacaaggtttattccaaggttgctaccgcgtcagatgcgctcgaaaagtatgatctacttttcgggggccaatcctagtatgtaagctacaaactataaatgtaatgcaaaacgctccttccagaactgagacatcaccccacctctacgcaacctccaaaatttggaatggatgtcagcttcgttaaagtacgccgatcggcaggagatggttgatgcgcggaacatcccttgcgggccgcataaccgtaatcgtgcccaagccggagacgggccgggcccgggcatcccccacggggaaaaacgtaccgccaataccgccttactgaacgcgaattatagaacctttctagaacggtacacaagctgtacgcaagccgtttgtttcgtgaaaaatagcattcttattttcttataaatttctaaacctattgcttattttcttatgccattaaacagagataattataatgcattcagtgattctgctggcaaaatatcatgtaatctatgcggtgtggggacacggagcaaatacatatgtccgctgcctgcaggtatgtgcaaacgagttcagaaaatggcatagaactagataatgagacccccactttcagttcagtgagataagagaagatcatcaaagcgggaaaacaaggctcgggagatggatcaatggcgcgggaggggtctaggcgccacgaggtctcatgcatcaaaatgcccaaagattccgggatttagaccattctatagtccgctctgtactagcattacatgatggttattttcgtctcaccttctgtattgagattccaactccggagggtagtatgtatgtatgagcatgacttcccaaatcatgtagtaaggctagatttgaaggccagcacaccactatatagctctagcaagggtttgtggtcagcagagttgtctacttagaacatgggagataaagtaagtttctaggttattgctaaatagtttgaacaacacagccgaagcatctcacgacctaaatttcggacaatctatcagtttgtaatgtaacaaaattctgatttttaatatcttcaacctcagaggtttgcagcccatgaaaattgtgtgcttcgttgtattaattcagtaatttactttcggctgcctgcagaggctctagctggcccccctccgtaaataagagatggatagttttgtagcggactagccctctcgttttttgccttatatcaatcagacttatatcttctcccgaaccaagtttcttatagatctgtaaatatacgatatcctgtacgtgaagggcgtaccaggaacttattacattcttacctctatcgtttcttcatcgagtttcatatcatgtcattgaatacagagcattcaaaaggagaccttcgtcttctcttcggaccacaatgctctgaaattgaagactccatcgcccacatccgggatgccgtatacaaagattcagccggtctggggttcttatctgatattcttgacgagcttccctccttatggcccgtcataacttctgcctggccagccctacggaaggtgcagggggagaagcaactagctgcactggggcggcgttttgagaatggatctccagatagtgaagcagaaccctcaagtctcatcatgactccagtcacggtgatgaaacatctagttgacttttggaatctccaaaacgttgcgacacatccggcgtttccatcctcgccattatcacggaccacagccccaaggataatcgactcacaggggttctgtgtgggtattctggcggcaattgctgtggcctgctcccaggatacacgggaattccagtctttggcttcgaacgccatacggctcgctgtctgtattggggcgttggtggacttcgatgagatcgtgtcgggtaaggctaagtcaattgcagtgcggtgggagaccccagcggaccatgactatcttgaacagaccttgacaaaaagtcccaatgttagtttctcctcatggaaagaaaaggaaacaaaagcaaagagctgatagacattcaaggtttatatctcctgctatacagacgttaacagcgtcactatcactatccccggtgacactgcacaacgggtcaaattcaaacaggagcttagcggccgtggtcttcacacaaagccgatccccctccaaggccgcttccaccaccagcaaacacaccgcgaaggcatccagcacataatgaatctatgtgtgaaggatcctcgctttcaactccctcacagcaacgcgttgatattaccccttcgatcaagtcacaatgggcaggtgctcataaatgcagccatgttgcacactgttgccttggaatcaatcctctctgtcaaggcagactggtggggaacagtctccgcattactaaacagcgccgatatggaagttgacgagtcccgtcttctatccatcggccaggaagagttcgtcccacgatcagctagaggccgtctggtagccaggagcaaccttgatgtctacggggcaggagtgtttgctaacggtaacacgtcggctcgctccgcagtgtcgctgcagaacggcacgaacaccctcaatggtagtccacaggcagctgagatgccacctattgccattactggcatggcttgtagatattctaacgcagacaccacgagcgagctatgggatttgctggagctgggggtatgtacagtggagaaggcccctgggaatcggttccggatgccagacttgcagcgggagcccaagggcccattttggggtcacttcctcgaccggccagatgcattcgaccatcgtttttttaacatctcagcgcgagaggccgagtccatggatccacaacaacgcgtgttgctgcaagtagcatatgaagccatggagtctgccggatactgcggatggcagcacactgagctatcggacgaaattggctgctatgtgggagtgggatctgaggactatactgagaatgtggcatcgcggaatgcgaatgccttctcagccacaggaaccctgcagtcatttatagctggccgtatcagccatcatttcggctggtcgggcccatcgattacgctagatacagcgtgttcatccgcagcagtggctatccatatggcatgcaaggtacgatatgagactcccattgacctatctgaaagtgcaatggctgactgatgtataaatgataggccctgcaaacaaaggagtgctcgattgccgtggctggcggtgtgaatattctgacaaaccccagggtgtaccagaacctggctgctgcttctttcctgtcatctacgggagcatgtaagtcgtttgatgtctctgcggatggatactgccgcggagagggcgctggactcgttgtccttcggccattgcaggatgcgattgacaacggcgaccctatcctcggcgtgatcgctggctcagtcgtcaaccagggctcgaacaggtcacccatcaccgtccccgatgcagagtctcaacgatcgctgtatagaaaagctttgtcactcgctggggttgccccggatgaggtcacctatgtggaggcccatggcactggtatgtatcctgctttctttttacccttggtctcctctattctgccctcttctatttcgcctgcagtttagtaacaatgtcaaaggcacacaagttggagatccgattgaactggaaagccttcgcaaggcatttggaaacccgctccgaagtcagagtctccatgttgggtccatcaagggtaacatcggacacactgagacctcctcgggggtcgccgggctgttgaagacgatcctcatgcttcagaagcaacgaataccgaaacaggcaaacttcaggcagttgaatcccaaggtcatgcctccactcgagaacgaccgattggtgattcccgtagagtcaaccaaatgggcatcagcgagacgggttgctatggtcagcaattacggggcatcggggagcaacgccgcgcttatagtgagagaccacactcctagcctatcgggacaggggaaggcaatggcggaatacattcgagatatgcctatcttgatttctgcacggtctgaagaatctattcgggcctattgcggtgcccttcgcaccacccttttgaggcatccgtattccaataccgtcgtccgggaattggcgtacaacgtcgcaatgaagcagaatcgaacactgccgtttactcttaccttttcaacctcttctgatccgacatcactgagcacccgcttggaggctatcgccgcaggcaagtctgccgatattatccagaagcgggaatccaacgagcccccaatagttttgtgtttcggcggtcagaatggagttacttcgagcatttcacaagaactttacgacagctgtgtccttttacagacgcacctcatggcgtgcgagcaagcaggccagaagctcggccttcccagtcttttcccaactatcttcacatcagaccccatcgtgaataccgtttacctgcacttcatgctcttctctatacagtacgcatctgccagagcctggatcgactcaggactgcgcgtagaccgcatagtgggccatagctttggtcagctcactgcgctatccgtggctggcagtttgagtgttcaagaaggcatccgcctggttactgagcgtgcacgcctgatccagtccaactggggcccggagtcaggggtgatgctcgctgtggagggtacgcaggccgaggtccagcgtgtgctagagcagacaggccaccgtgctgaaattgcctgctataatggaccacagcagcaagtgcttgccggcacgggggaatgcatccgagcggttgaagacgctctcgctacaaacccattgacaagcaacgtcagggtcagacgtttggagaactcgcatgccttccactctagacttgttgatagcattgtgcccggcctcacagagctcgcagagtcctttgtctaccaagcaccagctatccccatcgaagcctgttcggcgactggcgactggtcgattgtcaccccggcaaagatcgtcgagcacagtcgcatgcccgtgcacttccaacgcgctgtcgaaagaatagctcaaaaactacaagttcccgctgtctggctcgaagccggctcagcctcgcctatcatccccatggtgcgtcgagtgctggagaaatcgtccgcaactcacacataccatagggttaacctcgatgggtcggacggaagcgggaatttggcaactgtcaccagcgccctctggggtcagggcgtccatgtccagttctggcccttccatcactcgcagcgtgggaccttcggctggatgaaccttccgccgtatcagttcgcgaagaacagacactgggttgactttgaccctactgctttctcgttttccggatcctccgccgaaccgcaatgtggcagtcaggagcgggctggcctgttgcgcaagttgagcgacggcccagaggagtatctatttgccgttaacacccaagatgtattgtataggtcatgcacgaaggggcacgcggtattggaccaaacattgtgtcccgcatccatgtatatggagatggtcctgcgggcagcaacttccgtattcaccttgggtgaatcctcaacgctgactatgtctcatatcgaggacctggtgatatcatcccccttagtattagatccgcaaggaagcgtgttcgtacgactgatcccagaggcagtggcttcttcccagacgtggtcattctcgatatttagcagtagcgggacgggtaatgagtcgtcgattcatgctacaggcagtgtatccttatgcaatgaaaggtccagggctctgtcacactttcagtctatgaatcggttgatggacccggcacgggcaagaggaattgaggatcatctggcatcaaacggactgaaaggatcgacggtttactctgccctcgaacaggttaccaattatgcagactacttccgcggagtgaggcaggtgtttgcaaatggccgtgaggctgcggggctggtcagtatggcaccgtcagccactgagaccacgtgcaaccccatcctcctggacaactttctgcaagttgcgggaattcacgtcaactgcctctctggccgcgaagcagaggaagtattcgtgtgcaatgctatcggggaaacgtatgttagcgattcgttgttcaaaaaggaagacggagctattccgttatcatggaaggtatataccaactacgtccggccgtccaagaatgagatcgtgtgcgatatctacgtgatgaactctcaaggagacggtcttaccgccgcaattatgggcgttcggttcatgagtgtctccatccgctctctcactcgcgcactggccaagctgaacaacaatttccctgacgtcccacaactcccgcccacgatccagccagcaattgtgacagccgattatgatgaagccagtgacaatgtaaatgtggatagcgaccttgttgcagtccaagagatgctttgcgagctgtttggagttagtgtcgaagaggtatctccatcagtctcgctgatagatatcggagtggactcgctcataagcacagaagtgctctccgagatcaagaggagattccataaggatatttcctattccaccttggtggatattcccaacatccagggtttgacagagcatatcttcccgggacattctcacctagctccttcccagattgtgatcaaaccagtacggcagcagacagtgataccgcaaactgtaacttctctgcctgtgccagctaacgccggaccgtcgctagtctcagtagcacaccaatgcttctatgagactcacgccgcggtatcccacacacacaatgccgactgggccggcttcttcaatgccatctatccgcaacaaatgacactcatcacggcgtacatcctggaagcattccgcgccttgggctccccgctagagtccagtcaggcagatgaggtccttcctattatttccgtcctacctcgccacgagcagttgaagaagcacctgtatacaattttggaatccgtcaacctcgtgcgccaaactccaactggtcaactcgtgcgcacagcgacacccatctcgccgctctcatcacacgccttgcatgcccagatccgggatgaacaccctccatatgcactggagcacgatcttctacagatcacaggctcgcggttggctgagtgtctgaccgggcaagcggacggggtatcgctaattttccaggattcccagactcggcgcctggtaggagatgtctatacggactccccggtgttcaagtcgggtaacctctacctcgcacagtatctcacggatgtcattcaaactctcggaaacggtcggcaggttaaaatcctcgagatcggggccggcacaggaggcactaccaagaatctcctcgagcagctctcggccctccccggaatggcgacacgcatggagtatacattcacggatatctcgccatcgcttgttgcagccgcgcggaagaagttttccaagtatgatttcgtacggtacgaaactattaacgtggagagtagccctccctcgctcttgcacggccaatacgacattgtgttgtcgaccaactgcgtccatgctacccgaaatctcgtcgagtcctgctcaaatatccgcaagctcctccggcctgatgggatcttgtgtctcgttgagctgacgcgtgacatattctggttggatcttgtgttcggactcctggagggctggtggcggtttgaggacggtcggaagcacgcgctggccactgaagatctttgggatcagacgcttcgccaatctggcttcgagtgggtgggctggacgaataatgaggctgtagagtcaaatgctctgcgcgttattgtcgcatcgccgacgaaggccccttctgctctggagatttgctccaagccggcaaacatggaaactgttgtttggggcgaaagaaatggtctgcagctgctggctgatatattttatcccgacgtggttgacaccacgcagaaacgacgagcatgtggtaagttcaaattcatcttttgtcccttgtaataactccatttcatactttcatttgctaaccctcttcagctctgatggttcatggaggtggccacgtcatgctatctcgtaaagacatccgtcctgcccagacacagacccttctcgatgccggattcctgcccatcagtgttgactaccgcctgtgccctgaggttagcctttcagaaggccctatggccgacgtgcgcgacgccctaggttgggtgcgccgcatcctcccaaatatccccttgctacgtccagatatccgaccggacggcaaccaggttgtggctatcgggtggtccactggtggtcatctcgcaatgacgctggcttttactgctcccgctgtgggtatcgccgctccagaggccatattggctttctactgtccaaccgattatgaagatccattttggtcgaggccaaacttcccctttggacagactgtcgcgtcaaatgatatagagtacgatgtctgggaaggcgtgcagagcgccccgatcaaaggctataatccagcgttcaaggaacggccactagggggctggatgtcaaccagcgacccgcgtagtcggattgcattgcacatgaattggacgggacaaaccctccctgtgctgttgggaggcatgcacaaagagtttcgcatacctgatgaactacctcgtccgacagacgaagagattcaggcagttagtccaaactatcagatccgcatcgggcggtaccgaacacctacgtttatggttcatggaacaagcgatgaccttgtcccgtgcgcgcagaccgagtcaacatataacgcgttgacccaaaacggcattgaggcagatatcagggtggtgcagggagctattgaggtcttgctatatctacaacatccagaacgggcgagaaaatggatatgttcgggttcactaacgctggagatttgacaagttggaacacgacggtgtgccaataagcggccctggccgcaacaaggaggaagaaaacgaagttactctgtctttcagtttacaatctaagagtttagtaggctgtacagatctgcttttcttccaagtatcccatgcggtctgaacttcactaaatcataagacttgctttaaactaatgaaaaggacactttcccgtcctagaaatcttcagttccttcatcatctcctcaattgccttctgcccctttccttcaaaatacttcggcccgatatcgtgaatatgataccccttcggatagtacttctcaccctggtcgcccgggacaggatgaccgagcgcccaggaaacccacgccattggaccccatctattccaaaatgttggtttcacgtagtagggaagtgcgtcccaagatttgcggtaatagcggttgtttggatcgggttgcttggctgtatttgacaccgcgaagatcaaaggtcgtgggggtgttaggtagcggagaatgaatgtgcgggttattaggagggcagagaagacttttgtccagaatggcgttggtggttcgtatctagttgatgttagcgctcgatatttcgttttataagatcagatcttactattccacatacaacatagccttcctcagccggtcatccatcatgaacgaagtgaactgcaatcccaccggatggaataccttcggcaaattataaagcagcacagctgttgcctgatccgctgattcccgattctgagcatctggaaccatatacttgacctcatactcctgactccaagtatccacctcctcgagccaatgtattccatccctaaaccccgtcttacctgacgggagaatgtcagaactaatacctagcgcgtcacctagactcttccaaaacgttccaatagcacagcgttccaaatcacttagcggccgccactcgaatgccgcgatgaaatttacaggctggacggcaaagagcgcaagtgtgtagagcaaatctgtatcaaggatcttgcctgaagcttggtagccgctgtgtaggaaacgcgtgcgggctacagagagaaaagcccgttgcgaggtagggctattttctaccatttcgccgataagggcggctgtgtctgtatagcgcttgaaggaggtttctggtttagaaaattgccctgtctttatgagaaggtgggagattgttggaatgccgtaagtctagaggaggttagaataagaaaaatatagattggtgtatatatttgcgtacccgaaataaagcaaactgccctgctttcacaaacatgaatgggaattctagctgcgccgtttctttttgaatctggaatgcttcttcgtctgtcatcttagccatagactcgcgtgtcgggaagtagaactttttttgtagctgtttaagtcgtctatagcgcagcgaattgataagaagggggtacgcaatcaacaagcccactgcaaatgaaaaccattgcggcatggtattgaaaatagctctggtggttgcagagaacgagggagttgtaaagaaagatgtgcctttatccataatgtggatattgtagttttgaagggtatctcaatcccatatagaaagctctgatatttaaatgattactggccccaaggcccatagaaaggggctatttatgtgacgccatttacatgtaactagctggtcataatacaagtactgtagaacatcgaaattcaggcgggcttgaagcaaagcccgaattattcttgatcattaggtcattgtatactatccgtctctccttgcacccaattatacgcaagataaactgaaaaaaagacacgaggcaactattctatttcaaccgtagacccaggtatcacatgtaccgtggacgtctaaaacaaagatgatattacatttatcttattcgagattttccgtaactgttttacatctttgtattattgcccttccatatgtatgcacatctatggatctagtaagcattctgcaaaggatggagtcccgcggggttgtatcgtggggctaatcttatacccattgagtctcttgcatgggcctggctggccccctattattatttattcagatatactccgtactatacagtgcttctccaaaagtacatacatgtacggtaaatactgcccgcatattacctagtactttggtgtagatgcattggtgtagatgcattatggtataggaagcagctcggtcacgataggctccacggtagctctcgctgcggtaagacggagcattcctcgtcactcatgcacccgctccaccgtctatgttattctcatgcatggtcattagaaattcatttttctgatagtcaccataacgtggatacggcaacgtgggggcagaaaactgcaggatgatgcggcaatgtggaaaaaccgggtctcttgtagtacaggatgtctcccctagaagtgctttgtgctgcgataccgggtataacttttgatagttctcaaggacagcccgattttctagctcatctgcaaagtttttgagtttccgtctttgaaggatatttgccaatctctaacactttattgcatttcattcacaaacatggttggttcaatggagaaccctggttcatggggccttgcctgtcttctgatcagcacctcgcggttcaaccgatatatgccctactacacgatgatggccgctggtaaggagagcaccattccaagctctctcatgaataaagtattaacttgaaatctccgtgacaaaacagtatggtctaccttgattgctggcgctttaaagttgcaagaggatcccgccagtctctctgtcgagtacatcctcttcaaagccggcctgtgctttgttcactgcttgttactatgcggtgctgggaacacatggaacgacctgatagaccgtgatattgacgccagggtggaaaggacaaaaatgcggccgttggcatctggaaaagtctcaaccgtcgaggccctggtatggatggtcggtcagtattttctgtcggtgaaaatgctggacttaatattggataacagaagcatgtaagtctgacattcagtgtgataaaactccggccgcatggaagagcacaacttgattaaccccgtccatccctcttagatggggcttaatgctgcctttgacagccagtatcatgctgtatccctacttgaaacgacccgtattcagcagagtcttcatctacccccagtatatccttggcttggccgtcgcctatccatcgataacaggctgggcctcaatcaacgggcaagagcagtccatgtctgagatcttcacacattgcaccccgatctgccttcttatcttcttctggtgcctctatttcaacaccgcctacagtcaccaggacagcgtcgacgaccggaagatgaatatcaattctgcctatgtggtcgcggggcaacgcatccggttattcctcgccttcctgggtgctctaccactcgcggtgattccgtatgttgtgttgaaaatcaactctccctggctgtggttctcttggatggcggtttggaccgtttctattgtgatgcagattgttcggttcgattcgaagaagcttgaaagtggcgggcgtattcattgggacaactttctgttgggactgtggactaccgttgcttgtatagtcgaggtcggtctgcagaaagtagagttctggaacctaatctagtataaaatagtataagatattctaaattcattctttctaatttatagttaactagtgcagtggggaaagtcgggatgcctagtttagtggccttgtccttcaggcagagaaaacgaaagcctggttgtncaagtagagtttcggggagcaagtagtctagacggatcatcaccccaagaatgaaaaacgagttgcgagatgtttgtgtactaggagattatatgctatggtgtggtctatgtgatccctatgcttgctagctgaccccccgggatggttggtgttgttgtgtcgtcctcgtcttgcctgcatggccaggctgcccatcgtgcatttccctcttcactatctgctttccactttgcctatcgtgcatttccctcttcactagttagttagttaattccccataataattaatatgatcacctgatctatcaaacatgaagctattcagagatcacccgatctagcttacttgctcgtttgcttacttgcttactgtttgcattcaatgcattgtttacattgtttgctagatagctaagcaagatatgcggtatttgcactgtttgcatgcaaatagacagctatatatacaggcttcctcccactttgcaacttgcttcttctttctctccaccattatgcctgctaccaccgaggattctaccatgctttccattgccactgccaccaccgaggatttcaccatgcctgcccctgatcttgcaactaccaccgaggattccaccatgcctgcgataccatagtaaatggtccgtgtatttgaaaatggagtgccaagagtgaccttgcctaattaggttagacccatgccaacagtaagaatcttacttcatgagaggaaaggtctttaattgactgagtgagacaaaggttgatcgactgagaagaccaagcaggtttatttggtttcagtacttcttataccattattgtttaaatggctggatcaaggattatggatcatggacaaactattttagtactgagaggaagaaccacagcacaactatctagggagagaaaaccaatctagatatccgggtactataaaaatttgagttgaacatggtaagtgggatcatgatgaaaccttgagccttttggaagggggaggttgggaggtcgactgatcaggacaatgctgtccttggagaagtttcactatactgtgttgccctcctcgacgagccgcttggagagtatttccgtatactccaccctgggcgttgacatcggctcctcgctctagcagtatctgtgcgattgtatcgtgtccactagagcaagcagcctggagggcatttccgtaccgtccacactaggtattaacatcggctcctcgctctagcagcatctgcgtgattgtattgtatctactagagcaagcagccaggagagcatttccgtatactccaccctgagcgttaacatcggctcctcgctctagcagcatctgtgcgattgtatcgtgtccactagagcaagcagcctggagagcatttccgtatataccaccctgagcgttaatatcggctcctcgctctagcagcatctgtgcgattgtatcgtatccactagagcaagcagcctggagagcatttccgtacactccaccctgagcgttaacatcggctcctcgctctagcagtatctgtgcgattgtatcgtgtccttcagtacaagcagcctggagagcatttccgtaccttctaccctgagcgttaacatcggctcctcgctctagcagtatctgtgcgatcttatcgtgtcctttagcacaagcagcctggagagcatttccgtaccctccaccctgagcgttaacatcggctcctcgctctagcagaagttccacagtcctatcatgtccattcaatgaagcccatatgaccgggtatattcctgtatcatcaggtgtattgacatcacttttatccccaccaagtattaaatgtacctcctgttcatggccattgaatgctgccagatgtagtgcactcattacagaagtttctctgtatggtctgactgtcttccaaaaaatgggaaaccacattgagaacggtttgtcggtcatgtcgtataatcgatgcactcggtaggtttctttttgggttgaagtcaaacccatctttcgtacgtgatcaggccaatgtgctgctgaatattctaagaaacttcgagtataggggcgcgagtcatcttcatcatattctaaatcctccatcaataagtatctcaaacaaatctcagccatctgatcttccgcatcagtcaggctgttccagtatgaaggattgagattgctggaattgttcttcgctataagaaattctctggctgtttgatggatgagataaattttcgagttgttcgtaaagacaaataggccgcaccatcgccgaagcttgctgtccaaattaattggatctagcccagcctgtttggttgttggtgatcctgagctagtagcaattcccaatgccatagccatctctcttatggtcagaggacgccgtgccgccacgataatctctagaatcttcttgactctatccattagatcggctgggactcgacagagtatcttctcatatgctgcattcacagaaggcggaatcagtgtgatcaaatcctctgtaggccgaaggctgtttttgaaggtagtgcggatatcatcaatggctagatgtagccaaagatatgtacggtgtttcatttgaagcagctgctgttcgattcgatgatgaagctccgttgatagtggcactgtctcaactagttctctcactcgaatccttaccaccagatcaatctcatcatgaatttgatcattctgctcctcccccttgatatgtatatgtgggaaagaatcggtgattactcgaaagtgatcctgtatatgatcgtagggacgactggtgaccaggaatttcaaacaggttccctccgttgatgaagatggctggcgatgaaacgcttcaagcttttcaattaatcggcgctgatccgtttcacgacattcatcaagtgcatcgaatatacaaatcgtcttgcacgatatatcagctgatgttgccgctattaagatccgccaaagctcatcaacttcttgccggagcagcctcccattcttttcccaggccggaatggcatattgtaatagatgaggctgctggctgaatagctgatgaagtaccgaacatagtgctgtagcaagattgttctgttcatcattgtctttgaagaaaaagtaacatattctcacagctggatgagaggtctctgagtaatcatcgattattgatctgaccaggacagacttgccacagcctgggtcagccgacacccagagaatgtcattgcagttgctctcccaccaacggatatattcagagctctggaaagcccatcgacaggtgcccttagctcgatttgggtttatgttcttttgctccgcgtagttaacgatcttgaacacttggtaacaacggcgctgctgatccgttaagactcttgctttctcttcattgaagtgacgttcgtgttgactatatgcttgatcgaaacgatgttggataccttttagctcctctgagtagtgcttaggtcaatatttgctgacgtaataattataagactgcacaagactaaccagatacaacagcacttatcctctcctcagcttcaattctgttgagagggatcctcttcagaaggtctttggcatatgcagctgccaccatagctgcatacccttgccactctttgttcttatgtgagtccgagtaatcgcagataccccggatgacgagacatgggaaagtgtttactagtccagcggcttccatttcgaaacacagaacctctttttccgcagctagtctgatctcgaatcaaagcatccttcatcaactggtttgcagaagcaatcaagccatagtgaatagcagggctatcttcgtcgtcggcccgctcactccgcagtactaacattgacggatcaaccgtatatatagcagaacctgcttggtgatggataatctcggggagaaacagcctatccgtcattggctctggccttttgtacttccgacgtagcctcatgttctttccaaaaatgccgttgatggcctcctcgagctgatgcccttttctctcgtattgagttcgaatgcctgccattgcagcgcgcaatatagctggtggctggttcagaaaccgtgcttgctgaaaactttggtcctggatcgacttgccaaaatcgtattgaaacacaccactctcgccaccgcgaggcgcactgaccacaacatcgcccaatcgaatatcatggttttcgcttggtacaccccccgccaatcccgaccatgagtccgattctgatgctgggaaaactactgagcatgttcgtcgctacactagccgcggaagctgttccatattcaccatcaggcaggacggcgatgacaacgttatgttcgcccatcctgcctaacgtatagtcgttggcatcgtttggtgacacaaagctcggtttgtcgtgctcttcatcgagaaactcttgtgcggcaatgtattccacgggtaaggcgcaaatccagcccacagtgtaccctgcaggatctgacatggcttcaacgcgagagaaaaagcccgaaaatcaggtacccgcgtgacctttcgaaagtcctgacgtgcggtgtgcaatagaggcctaagttatggggacaatatatgcggctgtgagtaaaggagaggggaggaggcttgagagaaggaagaaagccctagaaggtagagagaaaatgtttgcctaccggggagggggggggggggggcgtcagcctcatgatgtacacgatgtgcagcagcgagcggtaagagaaaagatgctattggcaggagccgtcttctccatcccctcgaagcaaagaaatgctaagatcagccttggaatgcactcatatggtccgtaatttcgctgtaaattacagggaaatacattcaggggggattatattgatgtccgttaaacaaaaattggcgctagtgccttgaaagtgggtcctgagaaaagaaaagcagtcgttgaagagggcgactaaagccacaacaacgaattggactcaagccatatctcatttggggctgtgtgcagatgccaagggactacgtgttccagagtcaacctataacccaatcatgtcacggtcctcgtcacctgagggggtcagtgcgcccgtcgcgcgcgacctggggtgagattcaccccaggtgatctcacccagcttctcaccctgtttatagtgcactcacccttctcgtccgggcgacacccacccgactacatattgactgcgtataagccacacgccggtaagttagtagttgggtgggtgaccaccagcgaatctctactgttgtatgtctgcattcacctttttctttatgattcgttcggaaacttccttttgccgccctagtcccaacttggtggcctgagctgttcctgatcgaagctgatcgcagaaaatagattcaccgtggctattataactgtctggtttggtcatagttatctcttccctaaggatgtagtgaagattctgactaaagcagaggtgcggaaacggatggctcgctgtaatggaaataaccacaattgaagagctctcccatggccgaacgcatggagtactggatggacccccactaagaaggaccccagcgctccatatccagggaaacgatctatactcttaggcctattgggttgttggttcttatattccctacgggggtctgatagacattaacatactaatgtttaatcaactactcgctagcaaactttctacttattaggtgcttgtctaatcccgtatatcgagatgaagggggtgagaaagtagcagggttcgcatggattcgggcatcagttaggcacacccaagtgactcaggatgggggctgcagattatagcgtgaattccgagccgtatgcaggtctgacgtagcaaaaccccataaggccgaatacactaagcccatgacccggtgatagaagtaggattttaagaaagattctccccttcttttcgcttgatagcaccaatctccctctgtgcatggggctttagcttgcctttgactcgttgttatctactttgaaacaaactagagccccgtgatcgaccggaaccgactacggctgattaatatcgacattgaccttcggtagcccaaaggcctggtccagtcctcttacaatgactgcgcagatggataccgaacccagaactcacaaggaatacgctgtggggtgggtatgtgctctgccaaaagagcagaccgcggcgacagccatgctggatcgaagacacgtcgggctcccgaaaccgccaaatgaccccaacacttacacacttggatctgttggcaaccacaacgttgtgatagcctgccttcctaaaggccagtttggaaacaattcggcagcgaacgttgccgcctggatgatctcgacttttccatctatcaaatttggcctgatggtgggtatcggcggcggcatcccacctaaggtaagactaggcgatgtggtggtcagcacacccgtgggccaatttcctggtgtggtccaatgggactttggcaaggcaaaagaaggcggcagcttcgaacggactgggtcgctaaacaatccgcctacgtctctgctcacggccctgacggcgttggagacggagcacgacttggttggctctaagataccggagtacttgaaggaattgagggagaggtggccgagacttgtacccaagtacctgccgtctgatttgcaggatatattatttaaagcagattatgggcatgcaagcaggcgccccttggatctcgatgatacctcgaatgttgacgatgtagatgaggacgaggaagagagctgccgattctgcgataaaacacaaattgtacggaagaaaccgagagatatgtctgtgtacttcggtctaatcgcatcaggaaaccaggtcatcaaggatgctgctctccgaaacaaactcaataaagatcttagtagccatctcctttgcatcgaaatggaagcagcggggctgatgaacaacttcccgtgtatcattatccgaggaatctgcgattatacagactcacacaagaacaaagattagcaggaatacgctgcggttgttaccgtagcatttgcaaaagaatttctggcattcttgcaaccaactgatgtcgagggagagcggccagtgaaagaaatacttgggcagggttagtcaactttaagatctttttactaatttggccgaaccccgctcttattagcagttcagaatgggcacgatgcagtggtgaagctactgcttaagaggaatgctgtcgtcgattttcaggatacgtatggccgaactccgctctcattcgtggccgagaatgggcacgatgcagtagtgaagctgctgcttgagagaaatgctgccgtcgattctcaagctcaatatagccgaactccgctctcctgggcgaccgaaaatgggcacgatgctgtggtgaagctactgctagagaggaaatcctagatcaaatcttcgaatcgtgaatattcccagtctccgacttctctctaacgaccaactcaggtgtgagggtattaatgataatatctttaatacagcagcacaaaagcgagaggagatgcgccaaagttgagatgaggcaggcttttaatgcgaacatacattgaactatcaccatggagattagcctcaaaggatagggtgtttctcctaacgtagttactgtaggatatagttgttgatttccatccgcttaaatactttcttcaagatgcactgtgatttatgtaaagaaaccacgactttgtcagagagcggttgattggttatgtttaatcattggattatcagttaaaacctttttttccagaacccgatcacaatattatcgagaagccaccgaccccaagaaaaaagatggggagaattctcacttccatcaccaggtcatgggctatggatttatgccacgtcagacctgtatgtaggggtcgaaattcacttaccataatatgcgtcccccacctcatcgcgcaaccgtcgcacggatctcagctggattatgttggaacatcattgggtggaccagtcaaaatgggtgacctgtgcaccctaacggtggcatccaaaagtcgacaatgtcacgtccgtctgatgttcagtagcgtgcccgttgccctgaaccccgtcagctaaacaaaagcagaatatcattcaattataccgttcccctgaaacactcggcatattggcatgcgcacatatatgttaattacctctatataccatatatcgtatttcctataggtgttctggggtgggcggcttgcttaccgaatacgataactgttagttagtgagtcctgttgaccgtggagcgtaatggaaatagacgtctgaattgtcatattcatatctcaacgaatgtgacgtcatgaaagatgattcaagccactatcttagtactgtgacttggttactcagtcaggcaacaatttgtggatcgatgtgattccgcctatgcaagatttgctttctagcgctcaacacagcctcgtcaaagcggaacagcctccctggattttttgacttaaacttgggtcattcttatacttcttatacactgagcttaatcaccctttagtacaatactactatgccgaactctcgtataacaagctctgatttatccgtctggcagtggaatgaaggtatatttctcaaatactctgttatgttacagtactaacagtatagaacatggctggcgcaaaagtgaagcccgtctggaagatctgcgaacagacaacccgacacgtccaccctcattgatttcagaagataccaaagtatatattatgtgagtccagcttatttggttggccccacaagaaaataaactaaaagtagtatgaacagaacgacaagcgcaaagaatatccgcagttctcgccagtttcatcaagtattcatggatgcattttgcattcccaaattctggtgggctgagcatcttggtaatgccaacggctactttggatgcgaagatacagatcatgtagggggagctggattcagtaagtctgctttatgtttgtccttgtgatataataaagggcgctcacactctaccgatactactagacacctgggcgtttttcgaagtcaagcatattgctagggacacgaagtatcactggtctaaaataaagctctttacacgatggctagagtcgactcatcagaccggcattctgctattcgacccaaccgataacctctcgactccactgtttgatccgaatctgacagaacttgatgacccattttggatgtaccccgatatattagaacaggttgttcggtttcaagaaggttcagtatggggcatccgagatcatgttcgagatgccgagaaagaacaaaggcctgcagacaaaaagcccaagcccaattacaggcgactccatgacatcgctcggcatgcaattcatgttaccgagtcactagatgtggccgtccagaacattgagcatctcgttcaacagcatgaaatttatataaaaagcatgcaagtggaacctcaacctaaatcccatcaacggatctcccggcggttggcattcttccagagctatatcggcagcatacggcaccggtctgtatcaaatcagctacgactccaaaacgaaattcagctggcattcaatattgtctcccagcatgacacaagtatcactgttgatattagccgtgctacgcggtcggacagcgctactatgaagacactcgcatttattactacgacattcttaccaccaacattcctctgtgcagtgttcagtatgtcattcttccactacgacgcagagtcgggctggggagtttcggacaagctgtggatatactgggtgtgcattatcccaacaattgctgcatcggcccttctctggaatttttggcccaaactatttccagatcatttttatagcgcatttcgagaagaggaaagcacagagctgcctacctttatttgaataaggactacttgcattgatagacaatatgttgtcgatttattatttgttcttttggagcaatagtaagtctccggcgaatcataaattgaagacaatcagaataactaaagctaagaatggtcgtccgtgacctatgacccttcctttattttcggaccctctgatgaaagtggcatcctaaatgagccggtcggtatacccctcaatagacgagctctcgaacaatggataaatggatctagtcgagactctattggaaatagatgagtctaacggaaaatcgtggtaatgcgagtgtaatggtcaatttatacagtatggcgaaaagttctctatttaactaagataatgcagtctttttgtatttggccaagtaatttagatgcagaggaatgagaagaccattgttttcggagcaagtgactagacttatgtacctcttttgaaatggcatcacttaaggcagaaatgctaagaagaacgggcgatgcgtagaattcctaggattaagatgaaatagctatggacccttagaagtttagtaataccgatcactcttgatggcttgtcttcggtttatgacctactgagcaatggcgcgaaatacatgacgttttacgatcagaaaagcggcgagaagtgagcacttaaacggaaagggaaaggtctcgagtgccgggtattattcggtacatatgtacaggacgttcgagttaatgatagaccatccagcaagtgcgttcatgcactgagcattcacaaaagaaagaaactagcaccacagtattattgcaaggggtcatggagatgcatatacttcgaatgaaagactaaacagcggcaggggtcataggggtcgggaacatgacaccgtacaaagatgagatccatgtctggaagccatggagatgagtattctcatcactgccctcgttctgagatccagcaggcgatacctggctctgcgcggttacatatgtgtcccgtgagctggttgctccaagcgaatcatccggctcatcatggctgcccgggcagcagaagaggaaagactgcgctttcacccacgacagaacatccggacatacgggcatgtttgtgtgagggccttcatttgcactgccgccgcagacagtcatcgtgaaaaccgactgcaaccgcgatggcctaggagggatgtggtcgccagttgccctcgttccttgggcagtagactccaccgaatttgtaggaccgtttgagctagccagattgcgcgacaagctgagaaatttattagctctgggccgcggtgggcgatttactacagcagggaccgggttcgatggagagggaaaatgtcgcctagaggacctggcgggaggctgggcacgcctgcttgggtttctcccaaagctatcctttgtgtgtgcaccttcaccataacgatcgtagcttgtatatgtggcttcgcggtgggcaacggaaagattgcgttggtggaaagggtggtcctgcagcggtcgacccatgttcatcccatgtccactttgtcgatgagggaaccggccctgtactagcgtaccattctcggctcttcctatcccattaacggaaatccaactagcatgagacgcagaagatggcaagccaaagaatctccttagggtgtcgccatacgaggtgccacgctgaccactagtagaacctccacgttgcatatttgcggatggccgtgcattgttatctgggatcatgaaccgcgcagagatgctcatagcttctgatgtgccgaaggagggaaggccagggggtgtaggcgatctttctggcggtggatatcgaggttggataatcgttactgcaggtcccaagttcccaggccatttaggcctacggatactagcatcaccgagggaaacagccttgcgatgtaaagacgggcggcggtctggtaccgatgtatttccactcaaaagaggtctcgaccggtgtgtggcttgccagtactggtcagataaaagcttggtgtgattcccaagcttccttgccattctctgtcgtcttccttgactggctggcacagtcatcggagtatgatcatcctgtgaatctgaaggaacgaatctggccatgtttaccgctaggccttgctcgtgaacggggttctcttgcaggagagacgcgtagaaacgagggctggaattatttggcgtggtgactctgatcgcattgtatatagatcgttcatcgcttagggtggactcaaatgagtctgggttatcgtatggcgaagtggagtcggaatcgcgaaggtgctttcctcgtcggaggctctgtgatgctgaaataaactgtgaatgagggttactagactgatcgattattcctcgggccatcatcttgaaggcaaaggagcgaagcctggtcaagataaaaatatactgggagagagtaatagacgggaatacccaaagaagagtatgtgatttccctgaaaaccctcatcgtgcctgccgagatcaagccaaaaaatattatacaaaacaaaacaatctatatgtacactctcaaatgaatatgcgctctaaacccgaaaacgttgaatgtcatgatcataatggagtgccacctgggctgggaattggcttgccagtcacctgggcgtgctcctttcttagggttcgcagcaacccttcaagtctgcgacgctcttcttgttcggcctaggaggtgttagttagaaaagagagaaaggcacaaagacaactcaccctcagtatcttcatgttctcgttgcgtgtgtcacgcatcatcttcttgaactcatttttgagcaccatggtagatgtcgtctcagaagtgccatcgcggccaacagatgtaggactactcaagttcatccagctgatacgttcttccgccagttgtgtctcgagttgctcgcaacgatcccggagagtgtcaatgaaaatttcgaagcgttcgcgttccttctcaaactcgatgctggcttttgtcatggcttcgtagtcatcgataatctcgcgaagttctctttcaaggttatccgcccgctgctgaagatcggcacctccgcggtggctcttcagagaggccagttcttcggtgagctcgatatttcgggtaaccagagcatcgttctccttttggacattagggttggaagccacctctgccgcgcgctcggctcggctaccataggcaccatccagctctgccttggccattgtcagttcagttgtgacccgcacaatctcgccttcaagttcagtcaactcattctgcaggcgagtgacgttctggtcggactgcgcgcgctgatcatctgcttccttaatgcgggcatcagattgaatccggatctgttggattgcggtttcgagttgagccacctcttgctctgcacggtcacgggcacccctgacctcctctgatctggaatcgctatcgttctgcagcgtttcaatgacgctctgtaggcgttggacctcgttctccgcgcggtcccgggcttccttgacgtcctcgcctttagcaccgtgctcgtcttgcagagacccaatgatgatatgtagacgcttggattcatcttccgcatgggcgtgggcctctctggcttcttcggtcttagcgtcgagatcattttgcaatgatgagatgaccgcctctagacgcttgacttcgtcttccgcgtggttgcaagcctctctagcttctcttgcttcttcactcttagtggcattatcattctgcaacgacgcaatgatgacctctagacgcttgacttcgtcttccgcatggtcacgggcctctctggcctcttcagtcttagtgtcgttatcattttgcaatgatgaaaggacgacctctagacgcttgacttcgtcttccgcacggtcgcgggcctctctggcctcttggctcttagcgtcggtatcaatctccaacgacgcaatgacggcctggagacgcttgacctcaccttcagcgcggtcgcgggaatcactgagttcctcggctttagtatcgttgtctctctgcacttcgtcgatgtattgttctaggcgcttaatctcggcctctgcttgatcttgggcatcccgagcatcgctaacttcgttagtcctggcatcagcttcgctgtgcaacgaggtaatgacgctttgcaagcgcgcgacttcgccctcggcctgaaccagagtcgccttggtttcttcctgagaagagccactgtggcgcatttcgttgagctgcgccatgacaagagccagctcatcgcggttggcgttgttttcacgttcggatacttcgagctctttgcgaacttgggtcaactgttccgtcagttctccgatctgggcatcgcgttcggcatccgacttggaattgagctcgcgttgctgctggatttgcgtggttagaatactcttctgctcaagtactccatccactcgactttccaggccatctacaccagcttgaaggtatgagagttgttcttccagcccctcgccgtgagacgcatcagggggtggaggcaaggtgggcgaacgagtcaaaccaaaccgatcaacaatggtttgcactcgattgttgatttcggtgagttggtgcttccaagcgtattcgacttcaggtacaatatcgcgagaagccacgggagcaggaacgtctcccctgtgcaagacgatattatccatgttattcttgatatagtccaagtgagcgtcgaccgttgctgtgggattgacaggccctccatcctctgacagctgcgggggagggtcaatggattcaccggggttgaactgtatcatcatgtcatgcatgcgcgcgctaagttcctccaatcgtcgttctgtagcctgcatggcctcggtattcattacgccggccgcgttcgtctcggtctttccgttcaagccaaagttatccaaattctcagttgtccggtagagactgcgatcgtcgaatttgtcataggtgctatccgaagtgctcggagcagggctcttacggcccttcttcagacccttgtgtgtcatctgcaagacacccgcagtgtgctccagcaagcgctggcagatcgtctgagacctcttctccaacctccagagttcctgcgccaactcctcacatcgtctctggctgaccgcgagttcagagtcgctcttttcgagggcctcagaagccccgctgcgaccaaatatgccccggctcatccggttcgagttcgaaccaccattggtattgtattcgccgctgctccgtggactgggcgggctgtagagcctaccgagagactgcgccgcgtcacgcagttttgtttcgaccgtcagtttccgcttcgtgccctggatgcgaatggaaagtagtgtcatttccttcttcagctcttccacctcttccaaggacaggacttcgtaattcgtgctatctcctatcgcggtctcggtcaacatgtacatcgccacggggtcgttggcattaaggagagccgagcttcgcgggtgatccggattgagctaccaaaaacaaaggaaccatggtcagctagagtccgggttggtgtgttgtgtcgctactcacagggttgtaccgcgaccggtcctcatgttgggggtctagagtatctcgatacccgtccactagtgtctttccaagcggcggcaccggacctggagcatcggaggcgtttatgctcatattcgatggataccgcgagtccccgtaggaggactggctggagcgcatacttgaattcatggtcgttcaatggccagggtccctccaattggaattcgtaagagaaattcaggaacaggcgtcgggcatcatgaggccctggagtttgcgatcggagagaaatgtagtaggggtcactatgggttaggggaagagtggagagggatctgtatttagcgaaggcacggagtagctaatattaaaagatggcggggagcaaaggagaaaatagacgatcggcatcaccttagggttcagccacggcaatttactgtgtaagatgttcgatttgtattctacacgtacggcgtagatatcataaatttacagattcaaggttcagattcatagatttagatgtatggagtcaatacccctgaatacgtatacgagatccaaggttggtcattccactttctttgtcttcagaggtgattcgtttagagaaatccactatattgtacagatacattctactagacctactgtgcacccactgtgctatatccgacgactatattagttggaaactaagataagccgacctcacttggttcgacgatcaaccccgctgtgtatctccagtagtacttgatagtacttgcgtaatgcagcgtcatagtagggctgctcaggtaccgccaagtacccggttgcgtgtacctcggatcccccagagtcacattgaaaaagccaagagactaaaaggatgggagaggccgctttgtttctctttctcatagaggcccacacagaatgaatttggtctgtcacacttcgctgtggacatgtcgaattttggctcttcagataccgagcagggctctcgacctacctacaaggtctataagcgacgcttctggggcttagcccaactggtattgctgaatattgtcgtcagttgggatgtatgcgcgccctcgtgatcgatccatatatcgatttcgcatgtcgctgacgctcgtaaacagtggttaacattctcgtccatctcgacaacggccgcggagtacttcgatgtctcggagagcgctattaactggatgagcactggctacctcttcgccttctgcgctgttagcccgtaagtagacatgaatcgcctgttttgaaacagcaaaagaaaacaaaaatatccgctccaagtatcccacattcactaactatactcccagcatcgtcatctggatcctgaacaaaagcagccccaaaccagctatagtcaccaccgccgcactcctgctagtcggcaactggctcagatatgccggcactagagccaacggcggcatcttcgggctcgcgatgctcggccagatcataatagggttcgcgcagcccttctgcctctgcgcaccaacccgatacagcgagctctggttctcagatcaaggccgcacgagcgcaacagcggttgccagtctagcgaacccactcggcgcagccctcggccagttaatcgactcagaatgggcgtcgaaaccctccgatattcccaatatggtcctgtacatcacgatcatcgtacgtgaaaccccatcccaaaaacttaaacctactcacccattgattcattctcgctctcgctcaccatgtaaaaacagtccaccgtcgcatcaatcccatcattcttcctccccgcctcaccaccaacaccagcaagcgcatccgccgcaaagccgcacacgcccctaggcgccgcagtgcgcaaactaatcaccacgcgggaattctggcagatcttcatcccattcgccgtatacgtgggcttcttcaacagcgtctcctcactgctgaaccaaatcctcagtccgcacgggttctccgagacagaagccggcatcgcgggagcgatcctgatcgtggtgggactcgtcacgtcggcaatcatgtcgccgataacagaccggtacaaacactacctgggcagtatccgggtgctagtgcctatagtggcagccacgtatatcgggcttattttcgcgccgggcagcgcggcgggaatcccgccttcatatgtggttatggcgctgctaggcgcggcgtcgttcgctatgctgccgattgcgctagaatacctggcggagattacttatccgctgtcgtccgagattgggagtaccatctgctggacgggcgggcagttgcttggtgcgtgctttattcttattcaggatgcgttgaaggctggggctggggctgcgccgccgtataatatgcggaatgcgttggtgtttgcggctgtggttgctgttgtggctgcgccgtttccgttgacaattgggcttttcgggagggaggttcatcgtcgaaggtgggaagttgatcgcggtgttgagatgcagactgtcgcggatgtgtctgggaccgttgatcatgttaagagggttaggtctgatgattctgccgtggatactgatactctgatcaagacatgagagaatttctgtatcagatttcttttgggatgagcgactcatccatctcagttcggaagagctgttgacgctttgctctttttatttattatgtgccataatgcacttgacgagtctttatttgatgtccctggtcagcccgagttatacctcgtccatattaccttaatacatcatgaatctatgaccacccacagggacttgagtcgatacatcagtcttagcgaattaagcatacttgtagataatctgaccacgacaataacgagccgagttatatgaatcctatagtcggatatggctaagcctagtctaccagagcacaatgcaatctagacagatgagattcgttttaaaacaagagaataacaaaagcacagtttgaacaggcggaagaccagctatctgtacacgcaaggctgagagaggagggcgaatgatctattattctgtttcttcctctgagccctcctccctgccttgaaaacacaatacatatgcgaacacatacacgcaaggaacgaccaaaaacatgatttcacatttctagatcgatcctgcgttctcaatccaaggcggcaagctaccaggctatcagtccgccttggcagccatcataaaaacgggattggtttttcttccggcgtttcggtccaagagtttccccggtatcaatgcggtggagagcgaaggttattcgagggccggatcgatgcaagggttggatggaacgccaaaatcaagactcaatggaagagtcgtttacttcagctccttccagagcttaggagcagcgcaggcagtgacgcagtgagtgaggtggaagactgggttttgttagttgcacaatccggactcgatggaaggtaattgcatggtttttctgaatccatcgttgatgtcaattgcacttacactcctcgacgcagtcctccttggggcccttgtagtcctcatcctcctcctggcgggtgacgcgctcaacgcactcgtcgtagtggtgcttgtagggagcgcagacggcggagtgggcgcactctgagagtgatagttagtctctgatcgagatggccggtggaattcctctttgcaatgccattggtggttttatcaaccacgcgcggatcctgacacataagaccaattggtacgaacaatagcctatgtccaacgatcgcatgacagagacgagaataaaatgcgaataagaatagtaaaagtcaggaaaagaacaaggtcactcaccatcctcgagcttgggcttgatgtcctcgggctcttcatcttcttcctcctcttcttcctcttcttcctcctcggcctcaccctcctcagcctcctcggaaggctcctcttcggtgtcggcctcctcggtggactcgctcgaggcggaagcggactcttccttctcggtgggctcttcctgggtggtctcggtttcggtgtcttgggcgggagcctcagcctgggcctcggtgaaaccgaaggaggagacgacgtcagagaaaaattcggagagacccattgcgacagagatcaattgaatgatgaccggaggtcttgtgtgggggtggaaaagcggaagggggttgtaattgaaggaggttgttggttttgcccaagagctgcttctttcggactggaaaatcggaaaggcccggccgctgagagacaccaattatgccgcacgtgattggccaatgggctccaacgccattcaggacgtgacaagtgcagtttgtgaggaagtcagtactagagttattcctgctggatataaggatctcggaggtacaggataattctactattgttcgttgagacccaacgttggcgagcatataaactcttcgtttctccatttctaagtgcggaagcaccgctttcgtgtcgctaattgctaattgacggggacataatgtacataagatagagaatagaaaggagccaattcaaatatgtgatagaaggacatattgaaatagattcccgaaaactcaggtggcccgtcgtagcctctcctccagctcgtgggctacactctgcgactgaacctcctcatagcatggaggcggttccatgggttcgttgctagtgtcagatgctcgtctgttttctgactcttctggtgtctcactgggtctagcatggctaggagtagggggagcttcatatgcaggcagctcttctagatgaactgctgagagatccacgttttgtcggccccgagtgctttcgcctgtgttctcaacagcctgctcgagtcgttccttaatccgttcgaagttggtatggaaatcaaaggctccgccctccttgaatgtcactttcaactgaacggcaggcagagacggtgaaatgccacccccagatactggttgtaccagagctgtccatacattgggtccaaagaatggtgcagatacatgtgagtcacggacattcaacaggggtgacgagaaggactgaaagtcatcgcttctggatgcgggaaggtagacaacctgacgagggttaaattggtcgggggcatggacacggatgaatactgactctttgattggtgaggtggatgcagccagcgctgctttggactgaaagtttctctgtgcctttatatccggacggtggagtcaaagagacactagtacgaggaggggaagagtagatcaaacgctcgttgggaagacggacgaagccctgatcatcaagcattacccaactaggcagtcagtatagaagctttaagttacatgggtctggtcctggccggccccggggagaaacagctatggaggtagatgcatacttgagagccatgatttggaatcattccagtcgcatgtgacactgtttttaatcagcccaacactcaggagaaatggtggtcgggttgaatgccgaccttcgaaggtgtaaggtgtggatattgcggggagggatcaaagcaagatctgtagatttccccgaagacaagatcaaaaagccaccctttcagagggtttcaaatgaagtgcagacttacaatatcaaattgagggaagtggaagtggaaaggcggggcaagcgcaggcggggagataaagctgaagggcaaacttcggcgttgcacgttgtacggggaaaccgatcacttttttcttccactctcaaatacacaattgtgaaaatgttttccagcttcgcagtagttgtggcaatgaaaatctcgaccccgcaattggcgagacgagtcaatgaatgtagctaagttgtctcccgcggaacctgatccgtctctaagtcagcataatgctagtcggctaagcaaaatatcaatgtctcaaaacaccctggagactctctgatgtatgtgggctcaagtttcaatattagtgaagctggcatagcttttggatatgcaatatttgacgagaattaacaagatgccggtcaagttagtaaaagccaggaagaccctgtacacggtatttataggaaagttcggctttccctaaaggttaaagacgaaagagaagaagagaagtaaaagaaaagagtcattgttgtatagtatactacttcctacggagtattccactgtctatatagaacacatcgtctccaccgtgttgagcttaatgcttcgcaatacgcttggctatagcatccaggtcgatctcatccaaaaacctggaatacagtagcctgacgctttgatccacccaacactctgcataaatgtcttggggtgtttgttggaaagtcggaatgatctcatactggggatcttatcttgtcgcaaatgatgcaagatcaggcctgtgctcacctagaaggggctaaccatgtacaacatagtcaagagtttttcttagtgtgactgatcatatcaactcaagtatcatgtaatatttggaatttacacagagagaacaagagaataatgagttcaaagttgaagttcaatcgtagcattgaacttgccttgttccagcatgtcacgttctagaagcgtccgagtcaaagcgcgcgctaaggctcaaacctttcagtttcgcatttcagcttttcccctcttcttgcgcttctcccttgatttcatgttctaataccctgtctatcggatatattggatagttcgtgctgatctgaggctcgaaatagccaagtaggtggatccccacctgggcaagctcttccggttagccgtactcatattaatctcttcgctagggacttcatgtcgagatcataaccctttcccgattctttcacgattctttgacgatccctcaacgaccctcgagtcttctttcctccgaaaaattgcccatcgggcttctacggcacaatgggagaaaagggccagtacatcccacccctcgttgggtggatgtatgacttggtcctatggtcattctccgtgctcatcgacctcttcttccgcgaagtccaccctagaggttcatggaagatcccccgccgcggccccatcattctggtggcagctccccatgcgaaccaggtatgccgctcgcttccggtcatacacacaagatactaatggatgttcgcccagttcgtggattctttggtattgatgcgcgtcattcgcagcgaagcgcaccgtcggatctcatggcttatcgcagaaaagtctttcaaacggaaatttatcgggtttctggcgagagcagttggaacactgcctgtggcacgtgctatggacaacttgaaacccgggaccggcaccatctatcttcccgacccggtcaaccagccaactctgctacgaggtgtgggaaccaactttgaagggaaaggcttccaaaaggacggaaccattgccctacccaccatcaacggaacatcatacagtactgcgatcgccgagatcaagggaccagaggaattgatactcaagaaggctttcaccagcaaggatgcgctgacccagcttactggacggcaagacattgaccgtgatgggaatttcactggcgatgcatccgcgcaggatccagatttcaagggtaccaagttcaaggttgctccgcatgtggatcagaccgcagtctaccaggcagtattcaagaggctaggtgcaggcggctgtgtcggtatcttcccggaaggtggaagccatgatcgcactacactgcttcccttgaaaggtaagctcttcgtattcaagaggtacagcagatttactgacatgatacagctggtgtcgccctgatggctctaggcaccctggctgaaaacccggactgtggtctgaagatcgtgccttgtggcatgaactatttccatgcccacaagttccgttccagggccgtcattgagtttggtaatccaattgagatcccctcggagttggtggaacagttcaagcaaggtgaacggcgggagtctgtcggcgctttactggaaatcatctacggaagtcttgtctcggtcactgtcattagtcccgattatgacactcttatggtaagtttctttatatcttaggggatttgcttccgctaacaattcaaaggtcatccaagctgcccgtcgtctgtacaacaccaaaggaaaaaatcttcctcttcctatggttgtggagctgaaccgccgtcttgtgaaaggttacgcccacttcaaagacgatccccggattgtcgctttacgcaagtctattgtaggatataacaaacagcttcatcttcttggaatccgggatcatcaagtggcctacgccaagttcaccattttgcaggtggtggccacgttgatttatcgcctaggcaaattagcgctcttgacaatcgggacgctccccggtttcctgctctttaccccggtcttcatcgcgactaagtacatttctgcaaagaagtccagggaagcactggctgcttctacagtgaaacttcaaggccgagatgtcatggccacatggaagcttcttattgcccttgcatttgctccggcgctctatgccttttacactgctgccctcacttattggacatactggaaccgagtcaatggacttgttccagattgggtgccactttggtcgatagtggtgatcggcatggtactcttccccacagtcacgtttgcggctcttcggatcggtgaagtgggcatggacatcatcaaatcacttcgcccacttgttctatctctgaacccatcgtcggctaacacgctggtgaaacttcgagcgagacgcgttgcactggctcagcaagtgacagacgcgatcaataccatgggacctgagctattccccgactttgatgccgctcggattgtcacagatccattccgagatgcgagcgacaccgataccaaggcggacaacggactgccggcgatcagaagaaccagcgtgccagaacatggcgagaaaatgccctcgtcagagcccctcccccgcaacgaatccttccacaacctggccaacattggcttcttctccacacgacctcctagtcgtaatcgtagccgcagccgatctgctagcgcccgacctgggtctcggcacgggctgaagcctctcagcactctcaccccgaaagacccgctcgaggatgtcagttcacggatccgtgatgccatgagggagcgcggagaacgtcgtcggcgtcgaagcgaagatggaagctgggatatggccagctcaggccctggaacaccatccagcggtgatgagtcccgaaaagatctttgagacgtgtactgccttggccatttaatcatttatcatgtcgaccatcaaccatggtgtggtgttcggcgcaaatctgtgtacgtatttactcttatataaccatacacgatatcccttgttttttttttttttatcatgaatgctataggtagtgcagatctgctaaaatcggaagcctttggtatcataattagcagatgtctagaaggaggcatcatcctttacacgattggactgcacactatgcgacgtatttgctcgatcgacgacagcagaaagctcgatttctagcttggcgccacctgatcactcatccccgatagagatgagtaaaatatcgcgtaagtaatacttgttttatagatgaagactgaaacctcggatcagccaatgcattaagatattcgtattggcagataaataactactagaaaccagacagatagaaccgtaatatatcatactttaagactatacgcaccatccgagtgtgtcaaccaattacgaagatgttagctgttgcccagagctgatgttgaccgattcattttcgcctcgccacttccactgggctaggtgaggcgcaggagcagaaataagcccataggatctaaaatcgcacatgaaaatggtgcagcctacgaatttaattacgacgcctcaaattgttcgagaaagtgccggcaaagactttcatcataactgaccacgtcgcgtttcgtagtacaaagccaaatccggccagccgctaaccgtgcaccttttatcttctgctctccagtttctaccccaacttcttgtttttttctgcggagtttaggggtcttatcttcttttcacatatccatcatgccgggctcattgcatatgtcacgcctccggaactggttcctcgcctctccgcctgccgagtacgccatcacaagcctcaaggaactgctgatcggcgcacttcaacagggccctatcccccagcatgtggcctttgtcatggatggaaacaggcgattcgcccgatcacatggaattgagacagtggagggacataatctggggtttgaagctcttgcaagagtgagtgctacattttggcagctcggcgttacacggcagcatccgtcttgtggccgaatctaacgactgatagatcctcgaagtctgctataagagcggagtgaaggtagtcacaatctatgcgtttagcattgaaaacttcaaacgctcaaaattcgaggtggatgcgctcatggaaatggccaaggtgaagctgtcacagatggctcagcacggagacctgctcgatcgatacggagcaaaggttcgcgtcctcggccgtcttgacatgctcaaacccgacgtcttggaggctgtcaacaaagccgtcgacatgaccagccgcaacggagaccgcgtcctgaatatctgcttcccctatacctcccgcgacgagatcgcctcagctatccgcgagacggtcgaggattattccacgccgatccaacacggtcactccacggctgctgcttctcgaaatcccttctcggaatcccatatcgcacataatatccgcgcccagacacacggctcgacaacacatgaatcacacagtgattctgagtctacgtcgggctcttcggggcaggatgatgacgcatcggttcaacacgaccacctcgaccgagtctacggatcgatgtcttcctgctcgtcttccacaaccctccacctcggaaatcagcaagaccccaagggcggctcaattgcgactggggcagatagcccggtctatatctcccccgaaaccatcacacgtcagactttgaacgaccacatgttgaccaagggtactccacccctggatatcctgatccgcacttcgggtgtcgaacgcctgagcgactttatgctctggcagacccacgagaatacggagattgtgttcctcaatgtcatgtggccagagtttgacctgtggcacttcctacccgtgatgcttggatggcagaggcggatttccaagtcccggcaggaccccaatgcggaggggaactttgccggtgaagcaaaaccaagtgatgaaggactagacgcgatgctgtggcgtcaagggggaaaggtcaaagacatttagtgatttgtctgtttatataccctgtgtctacttgcttttgttcagcttcagcatcactggcgtcttgctttttgcggagtttctgttgggcacgcctgacttggtatcagcatatatctatgcatcgccgtacactacattggtcttcggtaaataaaatatcatttacttcctaatcctcgacttcctatacgccagatccgtacttggatgcccacatttgatgtatgagcataggggcttgcttctacggctttttttcttccacgaatcatggatcatctttcttatccatctctccttctattacttcgtactatagatcacaatacaaggatgtccttctgattgaaaacatttagccacaagcagcaggcggtaaaacccttttgatgtccaccccgcgccgataccggttcacgtgatgttgagtcaccgtataccggtcccacagagaagaacctccagttgaaccatccgaacatcatctatcataccaattaattcaaaatggttaagcaaatcgccggttccaaggccctccttttgggttcaggcttcggtacgccccgcgcctctcttccagatctcccagacctaaatgcgcgatgctgccccgcatcgagtttgtagaggcatacatttgctaatttctgatttctcatagtcaccaagcccactgttgatgttctcagcaaggctggcgtcgaggtcactgtcggtacgtccaattgaatccacacgaacgcatattgcattgaatatcgctgacaatgcggtaacagcctgccgtaccctcgagagtgcccaggccctcgcctctggcttcaagaacgccaaggccatctcccttgatgtcaacgacgatgccgctctcgacgctgccctgaaccaggccgatgttgtgatttcgcttatcccgtacactttccacgctaccgtcatcaagtctgctatccgcactaaggtaactattctctagaggagaggaagcgggcaccgtgctaattcactataatagaccaacgtggtcacgacatcctatgtttcccctgcgatgatggagttggatgagcagtgtcgcgaggctggtatcacagtcatgaacgagatcggtctcgaccctggtctcgatcacctctgtaagtgtctatgccatggattcaaacagaccgacgctgataagaaatagacgctgtcaagactattcacgaggtccacgctgccggcggcaaggttacctcatttgtctccttctgtggagggttcgttcgaccagtcccatgttgtatagcggatgtagctaacaaacaacagcttgcccgcccccgaatgctccaacaaccccttgggatacaaggttagcaaaagtcccattccaccaatttgaaagtaactgacgaatggctgtttcaagttctcgtggtctaggttagcaactgtccaatgctgagttttcgcttgaacaaatgactaactagctcagccgcggtgtgcttcttgccctccgtaacgccgccaagatctacaaaggtacgtgcttgattcactctaacaggaaccgagtattaatgcacaatacagatggtgagatcgtgtccatcgacggccccgatctgatggctaccgctaagcccttcttcatctaccccggattcgccttcgtcggctaccctaaccgcgattctgtatgatatttatgcattcaaacgctttggtttcagtcaactaatctttctagactcccttccgcgagcgctacggtatccccgaggcccagaccgttatccgcggtacccttcgctaccagggcttccccgagatgatcaaggtccttgtcgacatcggtttcctcagcgatgcgcctaacagcgtcttcgataaggccacttcatggaaggaggccactaaggaggttctcggcgctacctcgtcctccgagaaggatctgcagtgggccatcgcatccaagactaagttccctaacaatgacgagcgcgatcgtctcctttccggcctgcgctggattggtctcttctccgatgagcagactatcccccgcggaaacgccctcgacactctctgcgctaccctcgagcagaagatgcagtacggtcccggcgagcgtgaccttgttatgctccagcacaagttcgagatcgagaacaaggacggctccaaggagacccgtacctccaccctgtgcgagtacggtaccgccgagacctccgctatggcccgcaccgttggtattccttgcggtgttgctgttaagcaggttctcgatggtactatcagcaagaccgtatgtttatccgtatcccctttgctctcgagattctctatactcacttcattatagggtgttctcgctcccgtgacttgggacatctgtgctcctcttatcaagaccctgaaggaggactacgatatggagctcattgagcgcactctgtaagggtgcagtcggatcttaatgaatatacttctagtaaaaaatataggaatcgcatagacgatgaatgaataccaaagtgtgtatttctattctatattccaccaaaccatggtatacaccagttcaatgttcacttggacgtcctagtcattgtgggccatatgattggatccgaaggatccaattgccacattggcactcttttgcgtatctgcactgaggtgtatatattaagaaggcgtactacacgttaaagaggaaatgtgatgtttaacctgatttgggattgatttttgatctgattattgttcgtaattagtacagtgctgcggaaaacagagcttacacgggcttctttatcagaagcagaacgcagggctccattcatcttgctatcagctatgttggaaggatgtcctgggtgtttttcaaaggacacccgacggcagggtcgattcgagagtcggccatcttataattttcgatatgctcgaaggcccgaagctgccacaatggcaaacaaagcgcgtatccagcacgccatctatcaaaggagctcgagcagatcaaaacgtaaacttatcttcattatcatagacataacaccatttctcttatcatagcatcattgcccaggtgtgccccagcagaccccaacgtacaaccgcaagcgggggtctcacgggtggaaaagaaagacacgaagtgaaaaagaaagcagagcgaataatctagctgcttgcgctttttgcgatctttatctgtggccaattcacggagagagagaaagaggaaagaagtcttttcggacgtatgcattgttttttgtgtgtctttcatgccaccggtaagagatgtattcgatcagagaatactgccaaacctacaccaaggagaagaacgaggatgattagtaactgattccagtatcgcgagggttttgcgggaggttgagatctgtagacagaggccagattggcaaagaagtccagaagagagggataatccgaaagagatgaatgtgtagacaaaacaaataaagggggagaaagaaaaggagaaatgacatacccaaaagtctgcttaatgctgcgaacatagtacgtgtcccaattctgcttggtgacatcctcctggccaaccggaacaccagaccaagaaacacgcatctgagtaacaccatcgatatcattctgatcgaagttgatctcctgcgaactgaagtggccctcgggccactgagcaagacgccacttctggacgatctgcttgggctcgttgagcgtgacgaactcgccagtcacgtttccgtcaaagatagcgaacttgccgccaacagtggcgccatcgaactggcgcggcgcgccgcgcgtgaacgctgcgatgcgctgcgggtccgtgaaggtagtgtaaagctcggcggccgtggtgcggaactcgtccgaggccgacacggtggttgtgttgacggcgaccttaccggtcttggaggtggtggtcttcgcggctggggtgtcggccttggtgtgcgggtggacgacggccttggggaagccgctggaggggttctcgcccggggcgtgctggaggtccttgccgtgctcgttgatcagggcgggggtcaggccggtcagagccttgcggatttcgacagtaagctttgtgcgcaccaggtcctttacgggctgcttggagttggagtcggcgcggttttcaatctcgaactgcagacgggagtttacatggttagtattacagatcaccttggcgattggggaatgggtcaattgaacatacgacgtactcatcttcctcggtgtcgtgggctacctcgggaatgttgatggtgccggtgacatcctcatcgtccttggtcttacctatggaagcgtctcagctgccaggtccacaaagaaaacaagaaaccgagataaaatgaattgatattggactacaaacctgagtattctagcgagaccttgacatcgaacagagtgatgaccttgcccttgcgctggctgacatctacgtcgccatccatggacaccagcttgtctactttggctgacacgcccccttcctcgacactgaggccgacaaggttcttttgcaggaactccttggcccagccagaggcatccttgttgacccagtgccagttgttggggttgtgaaggaccatgatgaatgttgactaggggaatgaaagaaaactctgatttggggttggaaagtggatttggaaagtggattgcttcctgtttttgagaaaaaatattgctaaaagttctgttggaaattcctgttagccatgatctttcgcaatggatgaaagttgcatgtgtaaggaaaggccaatgtcaggtctcggggcgtatcccggacttgttaagcgttgtccgcaagtagatggagaatcatctctcagactggtgccagctgaagtctcttcatgtaaggccaattgagtgacgccgaggggcaggttggaaccccacacccctcgttgcactcaagagtgaacgtagtaaaagcacaaggtgaaacttacagttggtgtaatcaagtccaaaacatcaaggacatcaaggactctgaggtgaagtaaaagaaagaagagtcgaggggaaagagagctatttgaagggccgacggaagactctagaaggtgcacgtgactgtggataacgctaacgatttctctatcgccattcttcttcttcgctaccagctgtattctttggatttctatatttttctagttgaaaggagctaggatatcatcaagttctagggagatagaccctcaaccaccccactttacggtaaacgacgttattttcgcatataggctggtcatttgaatataagtatccacaggtatcataccacatggcgctcctctacggatggttcgactatggtttgcttgcttgcgatttgcgatttgcatcttccctttttttggtagattgtctgctagctaggcgagaaatcgatggtttcatgtttgcagaagcggccagctatatataacctgtttcagcaccctctctctccctctctttctctctccgtcttagttattttcaactgatgcactctttatgatctagcacgtcacacctcgtactcaggctaatctacatcccaaagtatgatcgggttgctgatctctgacaggtctataacacccatggatatgtgcgtgtcatagtagttatgtgtcatactatatcaatccctctccctcccacaaaatatcacgccttgaagatagtaactgaatgaacgttcactatggctcgacgctcttatatatcttttcgcaatattttgcgactccgtgatccacccagggtcgaaccggtcgaacccaagaggtccaagacactctggaggatcccagcagaaatagtggaaatgatcttccagcttctttccgatctagaccgagcttgttttgcactgtgttgtaagaggccgcatgtctgctatgtctcacataacaaacaatatagaatatctgtactgtcgaaattgcccaggacgttactacttcgtcgccttcaaaacgaacgctgggtatactgtcatagatgtcaaaatcttcaccagaaccccagatggcggtttcttagctggaaatgtgatccccagcccgctatatccgaatgcaatgcttggtgcgatgtccaacacgatgacagcgttgacatatgtccatgctcgagtatcacattccaccagaagcaacatccaattgagtactttcgatctcaacaggagactttagaaaaatcagattatcagaaatgatctgggacatttacacatccatgcactgttgagcatcctctggcatgggtgactatcctaactacagctcggttaaacaagtctaccaagactttccaggtgggaaatcagttggtcttccagacttctaaagaaacagcttcgtcggagctcttccaaaagatcggctctagaccaagcaggtatgaaaccggactttggctaaaggacttcttccatgatcaatccaacttcttcattggggatgagagctctaactggtatcaatgccatggctggagcattgcaaagggcaagccgtataacttcaagataacgctacatagagacctaaggggcgacaggaggcctagcaaagggtgggaagacaattgtcataattagatgtcgtcttctagattgctctttttgctagccagccttggtttttcaatttgtattaacttccttatttcaatttcataatacttcttatgtgatttgcatagaacatgtaggtactactaattagctaactgccagctatatattctttaagatatatattttttccggctgaaatatgtatattcaactctcacatccctgaaggagaccgaaaactcaagtgtcgcaggcactgcctcgcgtcaatctataacgaacgtatggggatatcacgctgccaagtacatagcaaagaaaaatcacaaaagccactcttctattcctcctattcctccaattgctccaattcctcccagccatcttcactcataagctgttccttcacccgttctctcaatccctcgatctggctccctagcgcctcagtccactgaccctcaacagtagcgaccttatccttaagatccgtagtcagagccagctcttcatcagcactcgtctcctgcatttccctcctcacatcttcctccgcctccccacgcttaatccgctgcgcctccaccagcttctgattagcccgcataacagcagaccgcacctcatgcaacagacacagcagattcgtctgcgactcaatgaactggtagctcgatttctctgcatgcgacagcagcgtatacagatactgcagcgggtgctcatggtagctcgggttttcctcgtattcgtctgcgggaatctgcacccggaagccgtgcaggtcctcgggcgcctgctgcacgagagcgaggagggacggggcgatatcccagaatgcggagagctgcacctcgacacctcgcatgacgttctgctcgatgacgtccaggaaggtctcgagccgagttagcgcctcggtttcgtactggacgcggcggtcgagtgcgtcctgcgtgaagaaggcttgtgtctcccggagcttgtcttcgtttttggtctgcttgtaggggagtaacgcgacggctttgtatttgtcgtcgcggtcgctgattaggtcgaaggactcgcggtggagctgctcgcgggcttcgaagagccattttaattgcgttagtttttcgaggagctcgggcttctcgtcgccttcttcctgtgtttgatctggtgtcccgctttgtgcatcgtcggagagcatgctactcagctggtcgatgcaggttgtggctctgttgattctgtcgacgagaatggcgtgcatcggcttgagtactgtttcttggtacgtgtctagctggcgtttgaccattatcctttctcgctcgttttcttcggcaatcattgctgcctcggcctcggctgcttccgcaaaggtgagactgccttcttggatctggctttggatgttcgatcggaagtggcgatggccctcgtcgacttgttgttggtgttcttgaagcattcgctccacgtcggccttatatcgatgtctggtggttttgatctccgcgagatcagtaattgaccggacggtggttcggtgagtaaccaaatcaggatggctgttattcacagcaggatggtggcggggataaggcggaggcagggtaatcaaccgcgagatatctaaattgcggctttcttcgcgatacccagtctcgatggaattcctgggagaatcttcaggccagctgactttctcaggcggatactcatcagagccatactccgtagtcgcataattcatgctcacatctttgggctgagaaggagtcaactcctggtcccctagcatggcctcccgaggcaatcccatgtacttcgattcccgcttggatcgttgaacccgcctctcacccccctcgccgctggaaccggttgctgattcccaccagcgacttggtgcacggcctcgggagctctcctcgttgctcatgttaaggctggcaatcggcgacagacaaggctgatagttattccaccacgcagactccggccgacctgctcggttttgtgggatatcaagctttggctggggcttgggcttgggctttggtggttgcttgactggcaattcgaaaagattgcggcgcacatcctccacttggaaagattcccagaccttggcgtatcgctgacgccggatctgagattcggcgagcatgtagtccgcaaatattttcagtgcttcagtatcatcctcggcactggcttctttatcaataaagatctcgtgcctttgaatcgcatcctgcaggaaagcaggatcttgtctaaggatcgattccattgacacctgcgtcgtttgctgtcctggcgttcggcgtgccgataggggtttcattatcgatacggcatcgttaggcatatggagaatatgagagattggacggtcttccggtccccgggatggtgcacgggagcgtgagcgtggccggacctccttcgctgaattgagagggggagtcggtagtgcctttggtggtaccgcttgggtggcttctttgggatatgttgacgagcccagcccatttggatttggcgagaatggaggcgtatgtgcaaatgcagtcgagggaccagcagagctaggtagttgtctgggagtcgtgtagggtgattgctctgtaacgacagcactggacgatgctcgaggccgcgtggcaaaatgttgtccttctgatttaatgctgcgggtacttccaggggtttgattgtactttcccgacgtcggatgccgatcttgacctggactactggtctgttctggtagaatcaggtttgacggtttgatttgctcgagagcatcggcccaaggattaccatttgacgataccgcacttgggggttcaaagacctgactttgccggttacgtcgttcaattcgcctttcacggatgcccttcgcactcggatcgcggactgctgggctgcggaaaagaccgccactaccgggagttctttgattcgatgaatcgtggggatctccatctgtcggctctggtgccttggccgcttttgccgtgtcaacatataaattctcggttggtcgactgttcaaatatccctcgtctatccagtcagctggtgtaggagggatgcttcccagtcctgttcctagcacgggaggtccccttcttgtcgtcctgttcgagctctggggcgttctcagagatgattctgatgagccactcacgctgacggaccttgcagcgggaggaggccctggaggtggcggtggaagtggcatcccgggctcccatgtactatttgacggcgatcggtttcgcgactgactcgttgcccttgatgatcccgcactgcttaccacagccccagcagatgcggctcttcgggatccaggggcacgcgacggtgtctcaaagtgagcaggtgttagaggcatttgctcgttaaagccgggtgacggttggccctggtcatactgtgcgagccgaggcctgagactagctgcagcattatattgcgtttggtcattatagggcatgccatggtactccactcgaccttgagaaacagatctactcgctggatgtccctgcgggggaggtggaggaggtagcgactggcgctgagaccccaagtcagacgggtaagccatagatagcggccggggccggtttgagcgtctttgatactggacaggcatatcaaacccacccgccctgttgtccggtggagaaggcgttccggcaaagttagaatttggctgaccagaaaagtccggggacgttcgattttggttgctggggggtgagtatggcggaggaggtggagacagcggcacatctaccaaagtatcaatatcacttcaaacgggtcatgggataccactggtctgcagaggcatgagctgtgagcgagactcacccggattatttctttgcggcgtcacacgatgcatagcgcctggctgaagatacggggcctgcgactggggcctgcccggaggaccccagtcctggggattataaggaacattgtatgcgttcctagacgccatggaagacaatgaaaccgatctgctgttaacaggcgatggaacagcaggcgatagactgtgcgtaaacgggctcgaaagcgaggttgacgatgaaggcgtcggtgttagtccaagaccctggtattgagggccgctcaatgctgttgtcaacaatggcggctgtacagcatgctctcggcgaggtgacgactgattgctaggactcgcagctgtcgacgaccagccggggtaatggttgctcagcggctgctcgacacctgcatgattcggacccagccagctagagagggaggatcagtatatagaaatacccgagaataagatgggtcgcacctattcatattgggctgtgcatccatttaggaggcccgttccgaagccatggccgcctggaatgaaagaggataagccaacaaaacagaggaaaagctatcagcttgaaacaggcgagacgctaaatttttctattctttgcaactgcggagagcaaggttaggggaaacgatagcctagcctatacggaggcgtgctccgtacggcagagtctgaaggaccatacgatgtacgggaaatgagatctaaatttggaacggaagaaagaagaactcgatcgagaacaaatgagcgcaggaggaagcgggggattgttatgcacctgagggcattctcatcacattcgcggcccaagctcagcgcttatcgttctccatgagaggcccaacgacggtgtccccgcaataaaacaacaaaaagggcagggaatatctataaaaagatcatagtttcatacattttaagtagggatcagaggtttctcgaattcttattggtattttccattaaactcccaactaatgcagccttccataaaggaagaccaggatattatcatctgtcatgtgccgaggcaccaggagactgctccgatatcttcgaattgttctgaaaatcgatattagtgtcaagactaacaagcgatagcaagaaacataatgtgtttggacaaatttcagataaagccttgtcacaggcgatggtcgtcaatattaaatccttacgttgaccgtcgtgataaattgaagtgaatcatcataaaaggatgagggaagaaagagaaagaaagaggtcaaaactcacagaaagaaggcaaagcagaccgccattggcgtctgcaattattagttcgctaaattgtttctgttcgagatccatcagcgtcgagtactgaatggacattgcagcaatgttgagactcgtgaattgatcaggcatgacagtttctcgtcttcgccagcaagctgacttggacatatgcttgtcttttatgtcgtttcatcatgtaaagtcgggaagggaaggagacaaggtgtacatacacccacagtcagtcgagacaagagagctcttcgtagttcaaggagaatatctgtcttcaaaggatcattagcactagccaaggagatttgatgagtgaaattttgtgtaggaatgaatgtcagaaaggcatgaatggttattaaaaagattgtgtcagcatcgaaaactcgaatcagactcgtcatctaaagggtatcatcatagaaggtagggcagcaagaacaacaagactcagtcgcataccttctacagttacagttggatctcaatcgggcacaatcaaaaaggcttctattcaaagggttagtgactgtgtcacgcaaccgtctcacgagtcgatgaatatatggtatgtctcagtgggcgaggttttctaggcctgccgcaaaaaggcgtctccaatcatgaccggacatttttttaaacgccgtcggagcccagtgccgtttcatcttcggacagagagtcgtgtaggaaagatgctttagtcttaccatttgagccagtagcgcagtaacctataagtcttcggaacattagcttatggtctgaaaagaattttcatgcaaatgttgagacaaggtaaagatcagaaatagccatttgtatcatcaccgacccgaaggtctgagacggtaatttccagcgtattttcatacacatcgcgttcatcatgatataggggaagggtagggtaaagagaccagggtaactcaccatctgcgcttgttgtgggtgtgatatctgcaaccgataagatgtatttactatcatttctggaaaggcaagttagctcagtccaactcaaggtttgtgtgatagttcaaagcaatgatgtgagatcagcctgacgtgcaataacataagtttcattccccggagggtcaaagactctagtttgtatttggttaaaggtatcatcatgttgaaaggtgcatagatgtgttagggatgaggacaaaatcttaccatcgttgcagatcctgtcgggcggctattggttagtgggaaacacattgtgtcaaagattatggttggctcaatgccagacatcaatcgacctcagtctccgtgtgcattgggatcattaaccatgctgaagatgagggtaggatgatgaaggagaaaaaagtgaaaacagaaatttgtacttttttcaagctctgacggcgcggaatcaccttcagccggacctagcctatattgggactagccttgacataggcgagttctgcttatgtcacccaccccaacggcctgccgacttgggaataatctagcattggagacagctacaacatacaatatacaacatataaaaaaggaaaagccaaaaaattatcataatctattgttttacagctgccagcataataaacatctatgcatgggatcgcttcttttcgcgggcccagaactgatatagaacagccagcatagctagcatgcacacatcaagggcaatagtccagttatatccaataaggtaccttggagcatcaacagtcttccatacactagataagaaatagattagtataaagttcaggatcagcaggttgcaccaacactcacaagagcggaatccaagccccaaaggtattaccaatagtattcatggcactgatgacaatagcacgctcctcggcactatgggcacagatctcatttgcccaggcatagataatagctgcaatcccatccgccgtgcctgacaggaagaacgcaaagaacttcagtccaatagggacattccagatcgctagcacaatacaagcaaagatattcagcaaagcagtggcagcaatcaagctagctttcgcatcgtacacatcagagagaactccacagatcacagatgccacaatagtgaccgccggcgagactgtcgtgatcgtgttgatgctctcgaccgagtatccctcctccttgagccagattggcaagccgctgttcgaggatacaccatcggcctgcgagaagaagaatgcaaatccgactagaacccacagccgccagcctttcaggatctggagaaccctcgacttggtgaatggttgacgggcttcgcggttctcggatgccatgcgctcttgcgcgaggcggacttcgtcggcgctgaggaaacgcgagtcgcatttgtctggtgtgctggggaggaggcataggcctaggaaggcgataggaattgtgcatgcaaagcctgatatcattagtctgtgtctcttttgttccttccttttgcgagacacttcggatacactcacaaattatgtatagccatctccacccttcaatcccgtaccgaccgtcaagcctggcataagctcccgcttgaatgtatcccgaactcatgctgccgacttgggaggcaatgaaaaagattgcgcctcggcgggacagttctgagcgtttataccaactgcccaggtaccattgcacggcagggaagaagaagcccccgagggcaccaacgaaaaagcggagagcgtagagctgggtgacattgctagccttgtactgtgccagagtgaagacaccccagaatagatcggcggcaggcaggaaatagttcacgggacagcgagtcatctataaaagacagtcagtaaattattgtctccatggggtagattctaagtgacaacgaaccaacaaagtcaaaggaatctgcatcgtgatgaacccaaccctataccaagtcagcatcaaacctcaattcacactccccgccaccaccaacccatcgtataaacatacatgtaaaccgtctgtagataatttaattggttcccataaagcttcaaatcctccttcatgccagatacataggctgtactcgtggccgatgaatccaagaccttagcccagtacgccaggaagacgaagacgatgatcaatccatcgagcttgaggatcagccgccgctcggcaggggtatccgtcggcgcaaaccactcataccatttctggcgtgcaggctcagaaccggacggatgctctgttttcgtggggttttcctcggctcccattgtctgcggggctttctcaatgggtagagaagacatggttgggtatttacctctaggctatgtatctccttgtgataacaacgctagcctctggggtatagggatacgacaccgccgatcagatatctgaattcgcttcatttttttccccttgggtgctttgagctgttatagggctgaaacggagcacgccatcggccgctagaatgaggagtcaatcaaattcgccggtaaatttttgacgctatcgccagaaattgcatcaagcaatgccaagctccgttctgattcgttggggccttggggtttgacccggggaaaatccatggataagtgttgagatggtcaagttttgcacttgaagaaggccggtattgctgtgggcctgggctgttgtggaattagtcaaggattatactcgtagatatcaaatcgagtaagcgtgttagctagcgttggaactatgcaggtgtagatgttgtgtgggaccagatctggtggcgtacccatctctgcacggaggtactccgttgatagcactagagaacaatatgatttaagattttattttatttttaatcccaacttgtgcaggtataactatcgtaaagcgctgaaaagaacaagactgcaacgaggcagaggtcgggaaaccaaaatgtaaaatccgaccaaaatcatcatgtccaagaatgaggtaggaataactagtgttaagaggatatatgcagggagaaaccagcatcctgaaagaaggaaagaacgtctcagcgagacgcttatttcttgtacttgttgtacatatcaatgaccttctggacctcattcttggagccaaggaagacaccactcttatcgtggattgtctcaggaacaacctccatcaaccgctccatgcgcgagttgacagcaaggccgcctgcattttcgaagaccatagccatgggcgcacactcgtacaggatacgaagcttgcccttggggctcttcgagtcggccgggtaggcgaagataccgccgtatagcaaagtgcggtaagcatcggcgaccatgctaccaatgtaacgggcgctgtaaggcttgccaccgtcttcgggatacttgaggctatggaagtaggcgttgcaccactcgtcccagtacttgctgttgccctcgttgacggagtagatggagcgcgactcgggcagtctcatgttggggtgggtgaggatgaactcgccgagggagttctcgagcgtgaagccgttaacaccgccaccgcgcatcgtaatcaccagctgcgctgaggcgccgtacatggtaaagccggacgccaccaggctagtacccgggtgaagcaggtcctctgggccgacggtcttgttgggacccaggagctcgtcgggaagctggaagacaccaaagatggtgccgacagacacaccggcgtccaagttggaggaaccgtcgatggggtcgcagacaacggcgtagcgagcatcggggtgctcgtcgaacctgatcacttcctcttcttcttctgagacgataatgcggcacttgccggagccacgcatggcagagatgaagatgtcattgccgatcacgtccagcttcttctggtcatcaccggttatgttcgaggaaccagcgagtccggtaaggttgatcaaggaagcacgacgaatgtagtaggcaattgacttgaaggagaattggagggcatggcacaggagcgtgaaatctccagaagcttctgggtacttgatctgttcttctgtgaagaatcgagaaagtgtgacaatatcagtgttgatgttctccgctccaacaggtgctgaagccattttggggtattgtttggaggatataggatatagagattaaaaagcgtagcaattgggtttcaggtgaagagtagcttaagtagcaggcgtgtggcaatcttgaaacaaggcagacaaggtaggagaagcagtttaacgtcagtgagcgggggggaattaaaccgggtagaagtatggggagtgacctcagtcccgttttcgtcatttgccccgcgtgacctgcccgggccctcgtccttcgcccctcgcccggttttccccctccctcgccgggaacgcccgtctcttaagtatggagcttcctatcaaaaatcactattattggtgatcgctgcacggattggaccttgtagcgataaacccctacctccctcccaaattagcttcacacccatacaaatatgtccaagctaatctgagatgtgctgcccaatgatctagatcctcccggtctgtcccttggccgactcggcctcgggatcagcagcggaagaagaaatccctataccccacccacagtcatgcgcacgtgaaaagatcctgagatttaggtaatgccattgttgtgcccaattaaagggggatatctacgctatggcgatagttcggtgtggatatatgtggcatagatcggtacaatatagataatgtataattctagaccctttacaatacaaaaaaagaaacacggagtgagacaatcccgtgttgtagaaataagaacgaatagactagtccacggggtcctcctccaacagggtcttgaagctgaaaggcaggaaaggaataccctcaccaacgaaatgcttactcattgcctcaacccagtgaagacggagcgagtgcaacatggcactggtaccttccatcacacacagaatgcaaatcgtcagcacaaaccagaggtagaagctgacaacaatcatgatcacacgggtcacggggttctcctggtcaaaggcaccaccaatggtcatggtccagagaacgatcgaaagttgctggtgggcaagcgacagagcccacaaacgaaggtaagaagcagtgtgagagatacagttgaggcagaattcgatggtgtggatgacttggtggatcatgatgtcgccaaagtcgaactcctcatgctcttcgctttcatcgatgtcctgagaaagcatggccacgccttctccgtcgctagccacactgtcacgacccagcccgccgtccaagtcaccatcggcgtccagtgcgctcaccctggagttctcgccgaggccgcggtaacccaaggcacgagcgcggttgtgttcgtagcggagccagagaggcttgaggaagagcatcacaggtacctgggccacagcgacgaggagcagaagaacctggaccatactctggccaggatagagttgttcatccaccgtaccagggctgaggaacatgaaaatgagcatgttgaggagaccgggagggttcacacccttctcctgccagttcacggtccacttgtagagtatagtgaggacaagataaccaaagattgactggaagaagagcaatccaggaacaaaatttccccagatgtcaaccttagatctgaagtaacgtccattgacgtattgcaagcaaagggcataggtcatgtggcaccatccaaggagaacgctcatcttcatcttcatactattcgaaaatagcaaggagttgtctgcttcgtgccagttccagtccagtccaattggaaagcgatagccttctctcaatgttgcctcgaccattttgccgggcttgatgtcctcgggccattcccactgactggggaagaaggtgaaagatttggagaaaatatcgttgtaaataaaaccggtgtagatcgagaacagacccatcatcaacataatataccgtccatagaatgccatgtatgtcagttcatccagtttagtccgcgccagcttcttttcccagaaaatcatagcagaagcggctagagtcatcagtgcaccgtgaccgcaatcaccaaacatgactgcgaacaagaagggaaaggtgacgaccgtgtacaggccaggattgacttccgaatacttagggataccgtaagcattcacgattgtttggaacccttcggtgaacttgttcgtcctgacaaaagtcggaggggtcttgtttgttcggatctggttgacgattgtaggaacagtgaggcccgcgcggtcgttcacgtcctggagggtcgacttgatcagagcaagagagtttgtcgggcaccacgcctcggcaatgagcgtcttccgcgcttggtcgtatgagaatttgttcaaggtatcataaacggccttctccttcttgacaatgatcatccaggcggcgagcgagcgagcaatttgggaaagttccgcatcaagggtgttcttggtgttacggagcacattgccaacatcgccgagacgggtgttgacttcgtgaatctggtccctcctcaactcactgttctcatcgacaccgtacaaggaggcgttgagcgactccgagattttgcggatcttagcaagaatgttcttgccatgagcgaagatgacgaaaacattcttgtggacttcctcgttcgtcattgggtcgataatgggctctggaatctcggactggttcatgtagagatttccgcgcagggtacgccagaggatacgctcaaaggctccgatgcgatcccggggaataacaccagccacgaatccaatgttcatttccgagaagctctgctgaccctgagtgtctccattttgatgaggggcgtgatgctcgatatcacggagcagaggagcttcatcgttgtccaaggactgacgaatgtcttctgtttgtgtatgggcctattcagttagccttgtctatcaacggtatactcgaggcaacttacccgatcgaaaaatccaccggcctctctaagtacccatcgccattcgctcagctcgacttcacgtttcttcaaagtctcatagctatcgttcagagagataatccgctgttcaaggctctcactgcgatcagccaactcatcgatctccgacgctaagggggcggccaatgtatcggagaaatccgtggaagatctcatagggattgcggccttttccgtctgttggtggaaatagcggagctgtctttcgacattgtccaggcggcggatttcttttgtaaaggttctttggaaagcgttcgtgtccgggttgagctaggaagacgttagcgggagtatcaaagcaaagcgctcttcgtcacttacatctcggaactgaacctggccaacttcacccaatgcactgacaacttctcttccgatctcgttggcaatatagagctgggtcaagctcatatccgccgagcggaagaaggtgtcccgtggaaccatggtgtaatgaggctaccaggagccgtgtctttgggaagaagacagggaaaagtaagaggcaaagagcgacagtaatagatagattcaatgagaggcacagatcctcggctctgttgttgcgaatagtccgggctctacttgcactcgttctcgggtggctctgtcaagctggctgcatccagccacgtgatttagtttgcacgtgatctcataggacgactaaactaaacaaaatgtctacaatatggccaacctacaaatagtaactaaattcctttaaactgctcctgggtagatgaactgatggcttattatcatgcttcgtctttcttccattctaggagtctgaatcagcaggggatctgtcctaatcacctatcggtgaataagagctgcttgccctaaccgatcatagttgaggaacgagtatgccatctcatactgcaaattattggtagtacgatttattgggacccgtatatactgacacagtgctatcggaacaagctgatgctttctatctatgttgtttttctataatccttcgatcgagtccctagttgacgtttccacttgttaggattaacgactttctcatgtcaaaaggttacaaagtcatctaggagatcttttaatcgaatgttgaagtactcgattccctaacatgttgaataatttcccactatgtcacccccagtgacggttcatgtttagaaagtatggttaactacccagaccttcgagcgtcagaataccaccgaatgagtcgatattccacctatcctactacctgttgggcttttccaactcaaaaagtgcaaccacatcaccttcaatcgactgctcgcggtagatactaaacccagtcctctgcagcaccttcacactgccaacattcgctctattgcacgccgcaaacagcttctcctttttcaaatccgatccagccccgtcgaaatctatcctgtcaagcttccaccacgcatctacaataccagcaacggcctcagtggcatagcccttgccccagaagtcaggatggatattataccccactgacggggctggactaagagcattgattcccgctcctccaataaccgtctgtgacgagtcctcggaacggaaaatcgcgaagaagaacctccgcccaatggcacctgatgcatccggggttgtaaatgtctttttggtaatgagggcctctgactctgatatgtctttgtggggtactttgggccagctacagatatagtcacaagtcagtacataactctcccgggttgtcgtggtggttgttctttgggtataatcttacagccagtccgctacgtcttgtcgtcggcggatctcaaaaatggccgtggcgtcagctaccgtcagtggtcgtagatacaggcgacttgtgtggatgggtctcaaatcggccgggacgatcacggatgtagcttgatcggggtagaagctcatgttgacggaatatgcgatgttcttagaagctgattcttgttgggtatagaaactacagttatatatattctgcgtgagtcattcgcggggctggctggtcaggctggtctacaacaatatcccataccagcgatatatacaacacataatagagatgcaatacaacaggacagcgaatacattttgaacagacctcacagaaatatattgctgtctagcttcgaccaccacgccgggatagcgcatcttaatgctttcgaagctccgatatacagtgccgcctcaccaattcagaagcccagaaattcaaatcaaaacagtttgaaattaatcatttacactcataatatatagtcggtggaaaaacgaaaagccaaccccatcgtcacggatagacagcagctcccatagagcggagtcgacgagcacacagaatgtacagccacagatcagcttcgacttaggcaccgccatccctcttcgcgtattcatcctccatccgctcctcgtacaggcgatcggcctcctccttggtcagagagcgaccactatcagcattctgcgacgggctggctgagtttccaggcgcggtcccgaaatagctgttgttgttgatgtggtcaggggcagtgtgtgaagcggagctaggaggttgtgtgcagttggcttggctttgttgcttgtcaaagagatcggcagtggggacgggcatcttggttcaggttgagtgtttaagtcgcgagtgcggcagtgatttcgaggaaaacagattttcaaggaagtaagtgaggatggtagactaggactcgagctgttgcgatttttggcttcggtaggatttcatgctggttttatgctggctggcaagagttgatctggggtcgccacagatgtggcgacgccactgtgagtcagacgtcatgtcaacaaaacgcagctgagaagtgagatttcagcagtttacggttggtaggggaactggggattggagattggacgctggagactggatgctagacactggacataaagtaccgtagaatgaagacgagatgaatatgccatcatttaattactgatcgcgataagcaacaggccgttgttgatgcgtgccgagggacgtggggacttggcgcaacggtcgcaccagcgcaagggtattccaagggacaaagttacaattacaagaaaatgaataattgccattagagcttattactatgatctacgaattacatctcttctccaaactcgagccactggctcaaggttgatgaaaagagttccacgaaggagagtgccaaagaatgcgcctgtcaatgaccacgagagccattgaacaaactgttccaccacgatgtgcaatgcagggaccaatctgtggtgacacgtcttattgatcacggtcacccaaacaaggtaagtatgaagaagaaagaaaaaaagaggaactggactgggaaaacgcggatatatataccctagctggaaagcggtggcagattcccagattcgccacctcacactgattggtcagcaaccgaagcaaatatgagcacgtgacactgccaaggcccaaccgcatgtgatatgactcatccacctccctttctggacattacagacctgtcaggtcagggcgaggaatgacgctacggagtatgtacagtgcaacgtgcaggacacaggtaccatgcatttctttcctaggtttcatgcttgcgccagagtgagaatgaaatcatgaaccatgaaccaacacacagacctcaaacatgaatcaataattgaaacctccttgttcgagacgcctcaaaaacaagccagactccatacccgacccgagcttgtgtggatcctcccctatcccacaactttgtattgtggctctcacgtcccgtactactcaaaagtccgaaagacgtttggatcacaacttgtttggaatacggtctgtcggaagtatacccttattcagagggttctacaagattaactcgggtgaggaacccacagttaatatcgaatagcaagtaaacgcccatccttatcagagtgtgccatggtttgagtcgatctagtggacgctagagtcgtcggggcttaaatggacgggaaatctgtcccttgtgtacaccgcaggtcaagctggcgcttggcgggaagtattacgattaatttactcggtaatgagctcgggagatatattctgttcatgaaagtagagtcttgctgtggtactatattttagtttttttttcctgctcgaaacctatagttacatgcatcatgtacggtgcaaatgtaagtccctggaacaatcacaactacaacgagtaatatggagccatatgtactccgtattccgtatatgcatcccgaaaaagcgggaaagaatccataggcgcccgggttccgctatgcatggcacttgcatggtgtcaaaatatagcccaacaacaagagaggagcaaagatcgacaagctgacttggaacaatgatgtgatcgtcgacgagcggtaaacgccgaccattcatgggatgcagcaggaggagggttgagcctaggacctcgcgaccgcaaaaaaagggcgaaaacggtaggcttggtacggacatgactggtgcttagtcgccctagaggtctaacgggtgcaaaaggggggccatgatagggcatgatgagataccgagaagggggtggattcccccgtgcggctatcattactggaaatgtttcaatggccacattctggcagtgttgggctgcgacctgatagtgcttgtcctgaggtagttgtagatcataccacctacctccggagatataaggtggtgccataggacattgtacgagaagaacagcgtatgaaggcactttccgttctcctgcagacactatcttgtcgatgaaccgtggaaatgaggaaatgaaccgaataaagtgcttgatacctacactgagtttgtagggctggccccttattcgctaagactcgaaactagatgcgtagtccggtggagactactccgtacttcgtgttgtacgtacttttttgatatattatcaccactaagaaatctacggggaaaacatagggggatgtaaagggtgacagaaaaggggcttaattaggggcatattgtccaagcgtgtagatcgtgttttcagtttcaactatgttttcctgcaccataagagttactttgtactccgtatgctgtactccgtggattagcagtatgagacgatcctggtatggaatgatgcgcatatcacgtaaagaggcgacactttgtaaatgtgctgggattggctagacgaaaagatcatgggacctttcccgcagcgcggcgaagacagttgatacgccgatagggacgtacatcaaagccggagtcaagaaggaggggttgtatcactgctggttggttgtccacgaggattcgcacgccactacatcatagagttgatattcggtcatggggcctgagtaacgattggaagtcgtgatggccaaccattgtagaacctaaagatgagtgcatggcccggtagccaatacccggcctaagccatgtaaatgcgacaaagttcatctacatagacggcgcactaggctgatcatgacgaagcaaaatgacgggctgccttgcggtgatatggtgggggtgggcatggagtacagggatgcccctccaaagggatatattctagtgccgatatagcctttccgagggagaggcttgcaaggtcggatctacttttgactacggagtacggagtatgcggagtaatacagaagaaccatcgaaacatctagttgatttgacaatgaatggattcggtaattccaacggcaacgccccccttgaactgtgtaacggcgtagttgaacgatgtggaatgagcgccaacggtgtggcgacccaccgaagaatagaacctccttacgggccaggaagtcactaactaagtatacttttcttgtgtctgatgacctgacaatctaagataaccccgccatgacgatatatttttcttgtatactctatagaatatgaaacgaacagaagttgacttttaaatcggtaggagcatccgaagtacatggagtaataagcgagatgtgaccgttgattcaagctgcatggccgatcatggcctatggtgtgatggtttcatacagtgcaaggccaagaattgcagagttttctttctcctatttgctgtttagttcctaaatttagttggatcaggtctagcgtcacggacaaagaagctcgtgttatcgtaagtattcttagggcatagattggcacacttccaaggttgtccatggctgttccacttgcaaagttagttgcaaagcgtatttggcgttacacaggagactgatagagtgcaaaaacagaatggaattaaaaaaacatgtcaaaagggtaatgagaatgacaaaatacagcatccatggatgaaaaagacatggcccgtaaaaacagaacgcaaataacggaaaatgacaaaaagaaaccaaaaaaacaaaaaaacaaaaaacaaaaaaaaccaattaacccctgaagcgccattagctaatctttttgtgggtcccctgagctctgggctccctgcaggtcctttccttttcagggaggacgccatcaacaaccctctgactcttttttttcccttttcctcttctctctcttctctcttcttcctcccacaaagcaaaatacccttacttcgtgatacccgagctattgtgctctaatttcttttgctttcttttgagataccctatacccaacacgcctattttacccctacgaagcccagcttctttaatacccgtttattattttaatcatgtctgaagtccagaagactgttgaggagaccccggtcgtccctaccgttgaacccgccgttgagactcctgccaccgaggcagcggtcgaagctcccaaggagaccactgaggaacccacagccactcccgccattgagagcaccgaggcttcggagcccgccaaggaggaggtgaagcccgctagcgagggcgttctcggccacaaaggccccggtctggtcaagtaagttgcgactgagatcacaactgcgacacggagactgacaagtgttcttcgtttcttttaggggcttccgcttcgtcaagcgcttcttctacttcaacgaggaggccactgagagcaagcacctctccgtcttccaccagaacgagaagtcctccgtcgccaaccccatcgccgcctgggccacccagaccggcaagggtctgcttttcttcaccaagcgcgctgaggacaaggccacccccgctggcattttcaacctcgtgagtgctttggcaactgtgatgtgatgcggcaaactctaacaatgaataggccgatgtctctgacgtgaccaaggagggtacacacgagttcctcttcaaggttggtggccacaagcacaccttccaggccgccaacaccgccgagcgtgacagctgggttgtcgctatcgaggctcaggccaccgaagccaaggccgagaaggagaccatcatctccagcgagggctacaaggctgagctcgagaagctgaccaagcctgccgttgtcattgctgccgccaagaagaccgaggaggagacccccgctgtggctggtgaggctgcccaggaggagcccaaggaggagaagaaggagaaggccaccaagagccgctcccagtctcgcaagcgcgccagcatcttcggttcgctcctgcccaagaaggaggccgaggagaagaaggaggagactcccgctggtgaagagaccaaggccgccgagcctaccgctgagccctctgttgaggctcctgctcccgtcgttgccgagacctctgagactgctgctgccccaactgaggtcgctgagcctactgctgagacccctgctgagactaccgaatctgccaaggaggagaagaaggccgaggacaagaaggctgagaagaaggccaagcgtgcttccatcttcggtaacttcttccagaaggtcaccagcccttcccaggagaagtccgagaaggaggctaactccttccctaccgaggagactcccgtcgctagcactgctcctcagctcgagcaccccgtcgaggaggccgctgccacccccgaggccgaggcctcgactacccccgctgaggctgtggagacccctactattgaggctcccgccgccgagcctgtccccacccccaaggagaagcgccgcacttccttcttcggcaaccttggcatcaagaaggagaagaaggactcctccgacaacgagctcaccgatggtgaggccaaggagagcaagcccaagaagctcggcagtcttttccgcaagcccagcaaggctgtcaagcttgacaaggaggaggctactgccactgagactgaggccaaggctgacgccgctgaggaggcccctgccgtccctgccaaggagactgaaattcaggaggcccccaagcccgtcgagaccgctgaggactccaagaatgtcaacgttgccgtctccacccctgttcaggctgccgcatgagatgcgactcggagtcctgtggagtttgaacggtggtgggacgtgtcctatccgccgcccgcccgcgatatacctgacgggctgattcagtcttgaaggtgcaactctgataccacttgctccaattgttttgcttttccctcgccactgtcgttatcttcggtccacggcccccgtttgtgtttgggcctggatctgagatgacgacaatgagatacccgctgtcgctttttttctttgattttctctaaaataataccatcggcgtcaacgacgcccccagactttggactgcggctcattcctttacgacctgcgtcccgcgattgtgactctgttcgcgacgcgactatgtgttacgtggtttgtcgtccgactagattgataccactctgccttttcttttttggttacttgcttttgtgtttgataccctgtggggaggatgggtgctctttttgcttgttgcttgagctttggatctagtctgtcgacttgtttctccctgcaacccaaattggccctgtaatgttgtctaccgttgttgtcccgaacggctggtttatattccgccgtataggtggcataccttgcgataggtaatacttaatagaatctctcaattttgctttacatcgtcatcgtattgtagttttgagcttggtcgttacgtggcgcaggcgataatccttgctgccaggctagtagttgtaatctctagcagcttatgcatatgatactgggaactccctcttagacatacttgtctcctacctcccatgtacctatttctcgatggtctcgtataaccgcaaagtgggtttgttcgttgtatttgctatgctaccccccttctattaatactgatgcggagacccagcactccctttccgcatcgtttaaaaaaaagtgtcatcgcaggctttatctttacgacatgcactgattcaatgccgaacctcttagagtgtatcatgtcgttcaatcccgggtaagacatcgtggccctaataatacagccacctgaatatcctcatccccgttcaaatgctcctcgggctcttcctctggggcatcacgttcggctaccgcgggctcgatgacaacacatggtctccaccaatccctgagtaaccaagatcatcccggtttcagtggaggcatcggcttccatgcgttccaagtggctgttcagagaaagttgagtgtggcagatgtcaacctgggattggggtcgtgttagttgggcagagtaactatagatatattcacgaatcggtcgtggatgaccttgccttccgcattgaaagcaccaagcattagatctaaactatccatagtcgtaggaatatccatttctacacctagaaaagacccacctgggaaaaagaaaaaatcgggtccataccgttgcatatgtatatgcaagcaatactcatagttgaggatctagcgacccatcgtgatgtcttggcagtctggggtgcagccttccatgttggtacttaaagaggttcattcaggaaaccaccattcgattattggatcaggcacggacgtactgtaatatatgcccgtgaatatccgtgagatcggcctctacacgagctcatatcgcggttacctacgtttaacatttgcaatatgatgcgatattgattgtagcaagatcgacagcagtctagacttgaaggtctactgttgactatgctagacaataatgacatgttcttttccagtgcatcgcacatgtctgcaaggtgcccggcgggctcctatttcggtaaagcctcgggccttggaggtacgtcggcattatcgcaggagaaacgaaaaatcaataaattgggtctgggttacgcagtgcaccgtattcgtattgactttaaagtatatcgatattctgttgagttattttttggaatcgagttttggacgagtatagaatgaagactggattagcatgctatagttatatctgagtactgcgtgtataatgttgtactgtactccgtctatatattctactccgtactccgagtctgcgacaatgaaattccggaaacaaatgttaaaagtcaatttcacgcccttcggcaagactaaggaaacgtgagcctctcataggacattggcgacggactcagcccaccggaacgagattgggaaaggatcggtggatccggtgcatttttctcattgccctcatggagaacgcctgtgtctccccgggtctacgtgcaacctcatacccaggtaccaaggaggaattgtgcggtgcctggatggaattgatttccaaagaagctcagaagcttggttgtgtgggttttgagagattttgggtgcaagaaaccaattgaggaaaaagcaagttaaattaaaaaagaaaatgcatgccttggaattccgggagggataggaatatgagcgctgattggtcaattcgaaaggaagcggagaggatcctggggacaggtacttggaagatacctgatttatgtatgcagatgcaggccaagtgcaggtaccatctgatgtactgcagtctcgatggatgcctgtccgatgtaaccaatcacacccacgcatgcaggctgtgactcacaccccgtgacttccaggactaagccccgtgcggctccggagcaccgattggtcagcaccagggcacacagcccttaagaagtgcctgagttccccctccccgtttgcctgatttttctctccctatacccgtctcttttttacacacatacacataaaccgccaaattgctgccacaccagaactatttacaacttcaccatcgccaaaatgggttcccaataagttccccgtctttcaccagccagtctatctcaactgaggcagacattatttctccatccggaaaccgccctttcatctcctctctacccccttcagagcctccttttggatctctgaactttagcatcgcgtcgcgtagctccagttctcccaacaaatttaccccgatcgacttaacgtcgttcaccacggattaccaccagcaaccatggcttccatcacccccacctccacagcccttggcttccaatcagaacaacaacaacagcaacaacaacagtgcactcgaggactttgtgctttatccatcagccacaccacacccgcagccccgcttgcgtgtgcctgtgaacacaacccatagaccttctgcactccagccattcttggcgcagaataacccccgacgacactctttcagtctgcagttgcaccgacatctccagcagcagttctctggttcacctgtcccagaccccagagtgacccagcttgcccggtccccctcttattggtcccgtcctacgttcacgcaccaccgttctaatacggcttctgtgccttccgattctccaaacaccaaccgcccacccatcccgctttttaacggtcaaaaccaaaacacgccaacatatcgacgtgtcatgtccacccctaacttcatggaaggtaattcattcatgtcgccctgtgatagcgagtatatcgctaactttatgaaagctaacgaggttgacctgtttggtctcccctcgggcgacttcgccgctggcatggattcagctctttcattcaacgatctcggcctggccaacttctcccctgaaggtcccccgggcactatctcgccgagggatctcatgatggatgcgtctgttcctccctccggtactttcaccgacctgagcactccctcgttcgagtcgcccggcaacttcagccaaaacacctcgcccatgttcaccgacatggatatcgctggccacgaagaatggccctctcttttcgaccactcgtcagacccactcaatgccttcgaccttgctaccttggatgtcgcagctgccttcactgaaccgaagaagccagccacgacgacaatctccatgtctcctgtctccccccgcgccaagcgatcggccgcatcctcgcctgttcccgcctccggtacagccaagcattccagcgtcgcaggtgtcaatgcgcgatcgcgtaagaacctgtcgcctgttgagttcgaccccaatgatcctattgctgctaagcgcgctcgtaacaccgaagcggcccgcaagtcgcgtgccaagaagatggagcgccagttcagctccgagcgccgcatcgaggatctccagaagatcatcgccgaacgcgacgcggagattgccaagcttaaggctcagctccagattcaaaatgcctaccagtaatggtgctcctttttctattcttggtcattcaaaatttgagacacgggtctttgcattatggccccctcggtgattctgacgattgtaacgattggacatttcgtcttcatgtttttgtttcgtttcgaccctctgggtattgtggtaggcgcgggtgatgggtaaagcctagccccgacgtctcaccgagatcagatgaacgcgatttgcttcgtcgcctctgattctctaaaagtttgagacaagttcctcagtcaatgtttctttttattttttccttctgatctgtgtttctcacttttgcgctctgctgcttcagcttacctacttcggtttttgattacttttgttaggccggttctgattgtctccctcttatgggattgactcgtggctctcttaatatgttatttgtctgtgtttgaatcaatcatcttgctctatctcttctacgtgtattgtaaactatcctagtagactaccccttccttctaaagactatttgtaactccctggtaccatatccttccctcatagatatacgaccgaacgataatctatctgcatctccctcaagtgaaagtgaaagtaatctagtccagctcagacttgcctttaaaatgcctcataaacacacccgatcccccaaccaccctccatctcataccacccgcactcacaacccttctcccatctccccctccctgtaccaaaaccctaaacagcactcctttcctccgcatctcgcccgcttccattcaacacgagcaacgcaccgtccggggactgctattgctctatgcgtgaacgaaagagggtgggagacacaggagatggggcgtttgaggttctggtgtgcagatgcgggtatttgagatgggtggatgggtgtgtctgtggatgtagtgtatggaaacgaaggacggttgttgggtgaggtaggtttcggaagtatctgattccatgttctgtcatcatagctggtggagggggtagggatagagatagagaaaaagatggagatggagatagagtagaggggggaaatgaaaggaagaaaagaaggatatctataatggaggatagaaagaaagagtaggtagatggatgatggatgtgtaggaagaagaagaagtggatacgcatgcgtaaagcacctcagaacgaaacaaacaagcagcagaaatccatccgccacaagtctccctcagctcaaagcatccgtacccctcgacctccccgtctccatcttcgccgtccgcgcgccaaactgaatagccctcttcttctcacgagaaaccttcaccaagcccagccgcagagcaaccagacgcagcgccagcttctcggcatcaataccagccgtagcctcgatttccgggagtccgaacccgcacttctcccacacaggagcccgcagcgtccaagccacgaactcttcgtctaggaatgggaagcgcgtttcgcggccccagtgcgagaggacgcggtcgtcgcggccgagattgcgcgacccgagtcgactgacgtcaagctcgatctcggcgattaggtctttgaagccgccgcggttgaaggccacgctgtgtcggccgtagccggcgaagagctcgtcggcgcctaggccggagaggaggacgcgnnnnnnnnnnnnnnnnnnnnnnnnnnnnnnnnnnnnnnnnnnnnnnnnnnnnnnnnnnnnnnnnnnnnnnnnnnnnnnnnnnnnnnnnnnnnnnnnnnnnnnnnnnnnnnnnnnnnnnnnnnnnnnnnnnnnnnnnnnnnnnnnnnnnnnnnnnnnnnnnnnnnnnnnnnnnnnnnnnnnnnnnnnnnnnnnnnnnnnnnnnnnnnnnnnnnnnnnnnnnnnnnnnnnnnnnnnnnnnnnnnnnnnnnnnnnnnnnnnnnnnnnnnnnnnnnnnnnnnnnnnnnnnnnnnnnnnnnnnnnnnnnnnnnnnnnnnnnnnnnnnnnnnnnnnnnnnnnnnnnnnnnnnnnnnnnnnnnnnnnnnnnnnnnnnnnnnnnnnnnnnnnnnnnnnnnnnnnnnnnnnnnnnnnnnnnnnnnnnnnnnnnnnnnnnnnnnnnnnnnnnnnnnnnnnnnnnnnnnnnnnnnnnnnnnnnnnnnnnnnnnnnnnnnnnnnnnnnnnnnnnnnnnnnnnnnnnnnnnnnnnnnnnnnnnnnnnnnnnnnnnnnnnnnnnnnnnnnnnnnnnnnnnnnnnnnnnnnnnnnnnnnnnnnnnnnnnnnnnnnnnnnnnnnnnnnnnnnnnnnnnnnnnnnnnnnnnnnnnnnnnnnnnnnnnnnttgagctgaggggtttgtttgggctgtgccttggccgcgggatgcgaagtacagggcgcatgcgatggacatgtccatttctgtgttgtggggtctcattaggcgcttgacttgctcccggtgtgcgagagtttctgtgtaggggatgtcgatggcgatgaagcgccatgtgcggcctggacaggttgcttggagctcgatgtgggcggaccggccggttatccggtctgggcagttttcatatattgagaggggcggggaggagggggatttttgttggttggcttttgcggcggctgccactcgcgggttttcgaatgctacattgaggaggtcgattggttcttcgagggggagaatgtcgtgagagagtctggcgagaagtgtgcagtctaaaccaccggagaagagaacggcggttttggccgtctggcctacaatgtagcctggaggctcggggatgttctgtattcttaattcgagggattgaagcagttttgactcgagttcctggacgaatactgagtctgttgtcaatgcaggaggctgctctgttggtaaggatgtattcataggtgggattgattttctcttggtctcttgtcagttgctgctcgcgggaagatatggtagacatacaatgtgaccagctggaagtgaagcagcagagctccatggcaaggtctcgattttgcacaactctctggcagataaagaaggatcttgatagcgagctaggtcaatcgtacaaacgccctcggtgcccacttccttgaagcaatccagcgatgcgctatcacaaatgctgcaaatcttcaaatttccattttcatcaaatccctcgaggagcgatcgcctcccaagacaatccctgctgtagaagagccttgagttgaccgcatcatagaagacaaaggcaaatggcccagagagacttgcaatggcttcagccattctctcaacaggatcattctgatcacccttcactgcctgtagaaataagttgaaaacgcgttcggtatcattgccttggacgcgctccccagcgatcttccaggcttctccgttccagcagagcacagactgggttgtggggtctacaagtggttgtgtgtacacatggtcacctctcaatgagagcactgtggatgtgaaggtgagataataggaaaggggcggagacactccatcctgtgcgttgatatctttttgcgccgtatgagttttgtaactgtctggtcctcgcttttggagcagagtgcaggtctcctgtgtcggtggtgtcgactttgacgagctcaatgaaaagaaaatcccacacatggcggagggacaggtgggagtgttgtttattctgagatggtcagcttgggctttttttggatatagaggtgcctgaggcattaaggcattagtcattatatccacccgccttgtcaccagcggatgcacttacgacggattggaagatgttgaactcgtagatggtttattactagatggtgtcttctaagaatgagttcgactctgaaatccgtgaaaggagatgggcatcatgcaagtacctatcttcgaaggtctggattacacaggctgagcaatgttagaactacatataggtatggagtagtaaatacatctcttgccgagtgagaaatccataatgatactgtgaagtcagcctccttaagataacccaaccatctgggcactcattcctctatacattattaatagacaccgcctgaatcgagaggcggactacctcggttgaatgatgatccgtacatcaatatgaggagccgcatgagcatacttggagtcttcatgaccccctgaatctattttttttgcccgggcgcatatgactaacatagcttatgtcggccacagaatccccgtcctctccgggtcccgatacgagagacgtcccccatatccatgaacacaccgaaacgccggccgctccaaccgaccgcctagctcaaacacaggacggtctcgtcagaccagacagcagtcaaatagtccaaatgagcgcgcaggatacaacagaggcacaccccgcggctactccctccgatcccgccgcgatggacttgacgactgcccaaccaccacaggctgaggctgagcaacttgcggggcagctggaaggactgtcggtctccggagatgcgactccaaatctgtcatccagcgcaaatactcctccgccccctccgccccagaaagatgatgtctacctcaacctgacaagttctacgaccactgcgccaacgctgccatctatcgatccaaaccacacccccggccccgaaaaagagctcccagatgtgcctagtgacagtgacccggaatttaaacgagctggtcaggctgaaggacctcgggacgataatgcctcccagccagagattcaaagtatcatgggacaattccaggaccccgcgcagagcaccgaccaaaatgtgatcatgtcaccacggcttgagcttgctgagcaactgcgaagcggtccaacatatttcccgccacgtcaatccagtttggaccatgcggcttccaccgagtccgtgaccgctccggtcgctaccccggagaagcagcctgtatcccaacgtccgcagatgcccgaatcgccggtaccaaatcggagagcgtccacctcgacgatcctaccgctgccggaaccagagcctgaccaaccattcgattttcaccgcttcctagaacagctgcgacaccgcaccgccgaccccgtagccaagtttctgcggtcattccttatggagtttggcaagaagcaatggatggttcacgagcaagtcaagatcatcagcgatttcttgacgtttatcacaaataagatggccatgtgcgagatctggcgagatgtttcggatagcgagttcgacaatgccaaggaaggcatggagaaacttgttatgaatcgtctgtattcgcagactttcgccccagccattccatctccaccgacgatacccagaagcgcaagtcggacccgacggagagagctagagaggctccatgggccgtggcgacgtggccagcatcaggaggacgttgagcgagacgatatcctggctcagaagatacgcatttacagctgggtcaacgaaacacatctggacatcccgactgtgagcggtggtggacgccgtttcttgaatctggcacagcaaggtatgtactatgttctggagattttccaacttgacttttctgactttgcttgacagaaatatcaaaaatcaatggctaccgggctcctcgagacaaggtcatttgcattttaaactgctgcaaagtcatatttggtttattaaagaattccaaaaaggccgacacatctgccgactctttcatccccctcctgatctatgtggttttgcatgcaaaccctgatcatcttgtttctaacatccaatacattcttcgattccgcaaccaggataaactgggcggagaagcaggttattacatttcatcgttggtatgtttgacttccatactgccatagatatccaaactaacctctcctagtctggagccatccagttcatcgagactctcgaccgcacaagtttaacagtcagcgacgaggaattcgaacgcaacgtcgaagccgccgtgtccgctatcgcagaacaaaaccgggaatcagaaaccttcgaagagaagactcccactcaaccccctccatctcaaccccaggctggaccaagccgcaaagaaactactcaatccagtgacgaagacaccgccccagtcgcaggactactacgcactatccaaaaccccctcaccaccatcggccgcatcttctccgacgacggagattcaggctccgctcctcaagaacgtcctcagcctgtcccgacaccccaaccaggtgtcgctcctccccgtctcactccgaatgtctaccagccaccccgcgcaagcagcgaggaccgccgctcaggtgatgagcgcgcccgcggtagcggaacctctgcgaagaagaatctaagccgtgtgctcgacgctcaggatgctgccgcacgccaggctagtgctgaagatgcggaggcgcgtcgcatccaacgcgctgaacataataatgttgtcgagacactctcgaacatgtttcccaacctagatcatgatcttattgacgacgtcgttaagatgaaagagggaaggtgagtacttgaaaaggtttatactattggatctttactaactgttcctcgcagggttggtctagctgttgatgcttgtcttgctctaagcgcagagtagtatatagaataatgtagcatcttcgcctgttcggggataacatgtcaggaacagtctcaggggcaattctgtctctctcatctttgacttgaaataaatagccccagaggtgtatctttcttaaaaatataatatcgcctccttcgcccggcagaggtacatccaccaaccggaactatcaattattgcagctgctagactgaagtatctatttaattgaaataatatatttatatgcatctgtgtataagctgttaaaaagggatggtcatcggcagttgaacagggatgaatgcctcaaaccccagagatcctcggctcttccccgcaaaaccgcggtctctcgggattttagtgtaactcattctccttcaaagagtaacatattacaataattccgatttggaataaatacagtctcttcttctccctagaggcaacattgcacaccatgtcgtcccccttccgcatcattgagcatgtcgtgcccactcagcacattagggagtatcctggcgccacggccaacgaccaagaagagcccctatatctggccgtgaaacaatatattccactcgacaatcccaatccacaaccaggcgacattaccattcttggtgcccacgcgaatggcttccccaaggtatgagatacaagtgccgaggtccagacccgctttgggctgcgcgcatagcgatggccctggacgcatacaacctagaatcggcgatatactgatcatttctcgcaggaactatatgaaccgctttgggaggaaatctacgctcggtctaagcagaatgggatgcgcattcgcggtatctggatggccgacgtggcgcaagaaggccagagcagcgtgatcaatgaagactccctcggaaatgaccgtatgtgtatgagtatcttatgagaagcaattgatactaactatataacagctagttggtttgaccacccccgagacctcctccacttaatcaacgtcaagcgggctgaaatgccccggcctatcgttggcatagggcatagcatgggaggcgcccatctgtaagttccaccaaccatcacattcacacagcagctagctaacctactcctagagcacaactgtgcctaatgcacccccgactcatccacacactagtcctcctagacccagtgatccagcgccaaaccacgcaactagacaatctcagcctgcaaatcaacaagcgcgtgatcgccaaaactacccaactatcaacccaccggcgcgatctctggccctcccgccaagcagccgcagaaagcttccgccgcagccccttctaccaaacctgggacccacgagtgctatcccgctggatcgagtacggcctgcgcgacctcccaacagccatccacccactagaccccaagaccccgataaacaaaaccaccgggcccccagtaacactccgaactacactacaccaggaagtcttcaccttctcgcggccaaactacacgaacatccctaacagcaccaagcccgtcaaccgcgtcacacacccagacctagacgcaacccatgcacacagctaccccttctaccgaccagagccagcccgaatcttcgctcagattcctttcctgcgtcctagcgtgttgtacatcttcgccggcaagtcggacatgtgcgggcccgatatgcgcgccgataagctcgctaacaccggtaccggactgggaggcagtggcggcgtggctgcgggccgtgtgagtgaagtcttcctcgaggattttggtcatctccttgcccaggaggctgtgaatgagtgcgctgatgcggcggtttgttggcttgcgccggagatccgtcgctggcgggcggaagaggagagtttccgcgcggcttggagtcggaagtctaagattgagaaggttactgttgatgcggagtggttggagaatgttcctgcgccagcgcgtaggccgaaggcggtacagaatggggagtcgaagctataggtgaatgatttgttcgtagaagtataaaccatatatagtttgcttttagattattctacatctgaatatagaacggtcaaggctcgtctgagtgtttttctatttctttcaggccctatgaatgagttcgccgaatcaacgactataatagttcacaagcccgaccccgttctatagcaacgaccccgtgcgcccccaattaaaaaacaagagcaaaaggtatctctatggtccaagccaaaagatccgtctccgggacgaatggtgttcgcgaaagcaacgccaagaagattataaagaaaacagtgctctgctccgagtctcgcggcaaaggacagacaggagcgtggtatctattttatgtcgagggtcacatttgcaagagtgtggtatatcgccacccataaaaattgggtgcgagtaatgaaccaactgggagagagaatgtctcggcagctgtttcacgttgacttcttggctcgggctaccgcggattcggatggcacatccgaggtgcggaccacttcgggaatctgccagaagtgcacccagcgcaggtggtatttgtcttgttcgttgttgaggcagtggcggagccagattccccacgtgatatagagataagcaccgatgccagtcatgatatgcctgcaagtgagaatgaattagcaaacagaccatagcaattcatagtaggttgagcacataccaccaaccatgtccttccaataggagaccccatggaagaccaacagagcggcgataccgacggatctcagagcagtatatgttgtccaagccccagatgaagaaaccgcccaaaaacatgctcagtccatatatcaccatgaaccacatggtcttgagggtcttcatgtcgcgcacattctcgtagttctggcgctccttcgtcggaacgggaagtcccatcctctggcgtgctaggcggtcctcttccgtcgagtggcgccatctgggtcggagggttgtttccatagtgtgcatgctgcggaagacgacgacggtagtcaggcacgcgtatgcattctggtggaagactgggtcttggagatagtggtagtacagggtgatgaatacagcgagacctgtgagcgtaattccgagaaagactcgtacggtgttggtccgggagtacgagaatgaggcatatgccataaggcaagtggtatagatcatcgagagttcgtccactagctgcatagggtctgttgtggggttcaccggtcagtattgctcttgcgatcactcatatcgtttaagacatctttggtgggggcccgccgcccttgaccacatcttggggttagtgtgtaggaaacttacacttgagggtcgagtgaaacagaaagcttcctgtgccgactactaggtagccaacgagggcgaccgtgaagatttggtcatgtccattacgacggcagctgcgaatgccctggactccaagccacatgaacagcaaattcgtgagtgtattgacaatctccgcggcatagggggtagcataatagtcctgcgcaaagacatatatcagcctagttcttgcctctgcgcttcctcatggttggaaatacacacctcttcgcaccagttcaaggtggaagtgacaggctcccagtatccggcctttgcggtcggatacggaaagaagggcaaagaccaaggcatttatgctgtataccaaggtagtatagatgtcgactctgtaaggtctgtaaggtctgtaagccctataatgtcctcgaaattcaaagagaagggaaaagagaaaagaacaacaaaaagcacatgacgtcgataacccacgggctcgttggtccgtgcacactccgcgagatgccggatgcagtcgatttcttcactcgagggctatttattgacatatttgtaattaaatttcgatatttacttcgatatcgacttctctatttgtgtttgtatgtttctgcttgcgtttggggctgtaaaacagtatgcatatgcgttggaatgatctacatgaagtactccgtactccgaacatacaacagccttacggtcaaagagccgcatgtgggatagtatagcagtcataccatagtcatactatgtagttgactttagagtgccctgagctacttgaactataactattcattgcataatactaatcttctactccgaatattgtacaatgtataaaatcaacataaaatgccaagcggtgtggcttatcgatagccattgctgaccccgatgacttcactgtttttcaacgtctgtcggcgacctcggcaagactcagcacttgcatttgctctcgatcttgttcaattctatttcccctcgttgaatccctggtggaatgcaagccagtgcccacatttgactgagaccgtctttgtggacctctcttgttttttttttccgcatccggtggatacgcctgcctgaccgctacgcatacgcgacatccatggagctcgatctggcattgaatcctctacctttaaaataaatatattctctgtcgccgaagtcgcggcccgggttgacccagcaatgtcgcaaaataacaccctaacggtgccacaggtgaaaaccaacacctcaacaagtatgtttctgtccaagctccaatcatttccatttcattgctaatcataatctgcttactgctatagcctcaaaaacaccctttcactttgctgctggtctttgctctggccttacctcctccatcctcctccaacccgccgacctcctcaaaacccgagtccaacagtcccagggagccgccctcctcccgactttgaaggctattatatcctctccgcatccaattcgcggattatggcggggtacacttccttcagccctccgcaccggcttcgggtcggcaatatacttcaccagtctcaacgcattacgccaagccgttgcgcaaaccaaccccaaagccttgaccaatccggtaacaagcgctaggtcatcatctgtcctcccaaaactctccaacacagccaatctcaccacgggagccgtcgcaagagtcgccgcaggcttcgtaatgatgcccgtgaccgtgatcaaggtccgttacgagtcggactactacgcatatcgcagcctaatgggcgcaggccgggatattgtccgcacggaaggcctgcgtgggctcttcgcaggattcggcgccactgccgctcgcgatgccccatatgcgggtctttatgttctcttctacgaacaattaaagcgacggttcgccctgatggccgcgaaaccctctaataatggcgaggcacccactgctgtttcgtcctcgtcaatacacttcgtctctggtggagcggccgccggcatggcgactgcaatcaccaatccttttgatgccgtcaagacccggttgcagctgatgcctgctaaatatgggaacatggtgcatgctacgcgcttgatgatccacgaggatggcatgcgcagtctctttggtggacttggtatccgcatggctcgcaaggctattagctccgcgctggcatggactgtctatgaggaactcatcctgcgcgctgagagacggtgggaaacgaatccccagatgggtctttaggcttgtgttttctgcctttcctgcccctggctatctccctccctcacatcatacccattccactttctgtattatagtctgttaagaccccattctagctcgcgtctgggtccgtgcttagagatgcatatctgcattgagattgacccaatgtgaggttttcttacacaaagctgaggcctgacatgtatattgtactgcatctgcatatactgcttatcatatcatccccgaccccaactttccatttatactaggggtatgccccaacctagctataccaagcctatgcccgtgagatgttcactacatgcgtagattagacagggtatacaaagtaaccggtacgacgagagaagatagaatcagaataaaaacatagtcatcagttcatatcgcgttactatactaccacatgctctgtgatataaaaagaaacacccaaaaaaaacaaacaaatcttaacaaaacacaacttggcacaatctcaacaagaaaccaataacaacgtttacatataccggaatccaaatttcttgtcacacatcaatcataggcaaaacagcgctgaataggaaaccatttatgcgaagacgcgcacgcggcccgaagggctcttcttccggaccaggaacatcttgtcctttcggcggtcgttgactttcagttcggtcatcgagtgggatgtctcggtgagcatcttggtctcgcgtaaacgtcgagtgtgggcgaagagctgttcttggaaatcgtcgtcgatccacttcttgatgatgatgtagttgttgtcatgctgtgaacgtgttagtctgcattgcacacacacggggggtatggttcttacctcatcccaatcccaaggcaggccgtaggctatcaaggtctctggcatcaagtgcttgcgatggacctgggatagtgttagttgaagccctagtatatagagggatgtatagagtactccataccttgatccatgtgatcttctcttccttcctctcgtcccttcgctcttccctcctctcttccctcctatcttcttccttctctttcttttcttcttttttcttctcgtcgtgttttttcttattgatgatgccgtcgatctcctcctcgctatagccaatgctgcggaggtgctcgcggaactccctcgccttctgcatggcctcctcagcctccctctgcttcctccgctcctgttcaagcttccactcttcaacagcagcagccttgacagcgagctccttcttcctcttctcctcggcttcccttgcctttcgcatatcctcatctcggatctgctgaatgagcttttcgcgctcctcctcttcttccttctcccgggcaagccgtttccacttctcctctcgcacaagcttgtcccgcgcctcttgctcctccgtcaaccttgcaagctccttccacttttcctcccgcacgagcttctccctctgtattttctcatcctgagcgcacgcaatttccttcaaccgctcctccatcagtttgcgtctaacctcctcttgctcagcagcggctctcttctccgccgccagctgcttgagctggtagcgctccccagccttgcgctcctcctcctcggatagatgcttacgctcgaagtgctgcagcttacgcagccgatccgagatctcttcctcgtactctagctcctccctgagcatgcgagagtcgtgcggatcgggctggttcacaatgatttgctcgcgcgaacgtgaatgctcatgtgaacgctcctgctcggcgcgccgagacttttgcagctcccgctggagccgttcgatctcctgctgatgcttccagagatccatgtcctggcggaggtcattgcgctccagcaattgttggcctatgtcttgccggatgtcgttgcgctccatcatgtgttggttcatagctagctcgtgatcacgttggaggggagaggctgtgcgcgagacgttgctgacggcgcgctcacggcggcgcggggcgacaggcacctgcacgatgtcttcctcctcttcatcctcgaagcggttgacgttgtacttatcgctgaaccgctgctgcactcgtcgagactggggcttgttctccgaccggctctctgatttcaacccttgctcgttgaaaatcattaccgccggtgcggtgggtgccactggtagttcatactcgcggtgtcggctactgatcgaggccgaccggggtacacgggtttggataggtggtgttatgtactcgcgtgtgatgatttccgggcggcgctggcgagaaacagagcgctcgcggatatgggttctgacacctgttcgccgggtggagacgtcggtctcaaactccgagtcgtgagaagaatactcgtcgtcatacattgctcgtacgggcatttttggctgggttgcgaccagtcgggtattgataatatagattccctgatagaggggcgctgggcggggttatcacagaagatacgagagataccccaagagaaagcgagagaaatgagaagtaagctgaagaataaaaactggctgaaatactcgaaatttgtgtacgagaggtgtgcgcttagatcttcagccaaagcgggggaggggttggggagaaagagaaaaggaaaaaggaggaaagccagggagtgcccttttattttgttcaggcgtcatgggcgtcatttttaattcacactgtatttcagcctcatgcataatctttggattcgactcgagaatcttttccttcgacagactccaccctctttcttatattcccttctatccttcatatactatttccagattccctcactgttgtactcggtacattgtccacactgtctactcccactccagcgttgggataccatcatcaccaaggccccacttcgagtccattctcgaggattgatgttagcgccgttgacaccgaggcactctaatattagttcttttagaccgcacattaggcagtgtcgcgacacagacccgcgacacatgaaaccacattctttgtatacggaactcaaaccagacccttcgcactaactttgaatgagccgttgagcacgcatccaggagacatcaggcggttactgaaaccgtgtttgttgtgatctcgttttcctgtggatcaccgagtcgcgtcttgaacccgtacggagcacttaaactgggtcccctttagcgctgagtcttccgacctaatatgttgtatccataatcgggacttcgagataccattcgctgcaacactgcattgggcaccaacaatgtctcatgtcttctccatcccaggctccatccacggttgatctatatccattttaacacacagtagctcgccgggtggggctttgcacccatggatattagtcgccgcttttacgggggcgaaggattgcgcccacttggactgagtgattcggcgaaaagcggcgggaaaacagccggaaatggaaatttcatggctgggaacgtgatgctatccatggaacgcagcggtgaacctgtggacgaggtcgggtgctcccgtgacgtgacccatggactgctgactcccgcacccgactggcttctcttggttcttcgtcacgtctataaacactaacatttgactacatttcaaatttctagtccttgaagaccagaatctatggaagttgtacacggccgtgtcggtgcgagtctccaataccccactacatcagtcttctgactgtacggagtaattcaaagcgactactccgtaagtggaatatcactagttatattcccaccacatgattggatgaaagaggggggcagtcacgtatatccatctttctgacaccctaggctaaagctatggagctggacaacgcatagctgcaaataatatcacaatcctttctagttgccactggcccaagggttggcacggcatttctatccaacgcaaaagacacaatatcagaaccatgggaagccagagattgatataactacacactccacttaagcattgctatcaaacttaatgttgagacacctaacccggaaatcctctgaggcctgatcctcgtactccagaatcatcaatttcaaatccgaagctagtaccaatgtgatcgaggcctgttgctagattgatccacttgcagattccaaagatggagcagacaaggcctgcttggctgtcgtacgattacgattcaaaccgatatacccatacccatagtctcgcccattctattctcgaatctattaattcactgcgtaaagcggattccgttcggcatctccgagatgaactcatgttgccatgagggagggacaggataaaggtcagagctcatatggactagtacgtgcccgactaatacaacatagtaccacagaccaacgccattggcgtcatctctgtagccaggcccattttacccggacaatgacgtagatattggcagcataggcgctcattcctggaatgagaactgataagacatgattcatgtgacaataccaaatggaaatgttttttgtggactttgcgctactgaccttttctaccttggatccttgaggaccttgttgaagtatactttcgatcagacccctttgcatatcagccctatcaaattgccattttggtgagacactatgcagatattaggcacctaccttgtacgcaccttatcgcgtgtcgtgtaatactagacagcctgaaagaagtaaatttaaacgtgcttcgcatttgacccttgcatcgtcggaaatggcagctgcagcactatgagctactaccccacaatgcgcttgacagctagcacaatgaacatattaaattgggatgttggcaccgaggctacgtatttctcgttagacgaagatcaatcaactcttaaatccaggattaggattagataagaatccacagaaggggaggatacctgtgtaagcaaagagattataatggtacgctctttcctcgcttgattcattcaagaaagacatttttgcaaacaaaactccgggtatctaagtcaccagccggcaatccaagtatgtatagtcgccagaacgtgaccaggagccggacatagaagggcagatattggaccttccgtgcatctccccggcatagtgtatcatatccaccaacccatcgcaggtccgcccggaagaaaatgacagagcagaatcagccttgtccgttcctgcccattaagattcacattcgcgagaatcgctaaacctttggtataaagataccacaatcaaggatacccgccacatgggagcgcatcgcgttcgcgtctcgctctcgtctcatattcttattccaacaatctactcacgccctcccagacttgagaatctgctccaagttctcacgactcttctggttcgtcgtctcgtgatattgcagcttcttctcgaggttggagatctcagcggtggcctcgccactctcgcgcacaagacgcttgttgactatgccgacgggaacgttgacgaacctagaacagggcgataagtcagtttcatttcacgagaaaaggggccaatgagtgatctcgccgactgtctcacagtttcggggttgcgaaattgaaaacaggaaaagaaatgtgataagaaacaaaaagccaggataggaaagagaaaacaaaagctcacattttcccgacaccctcgtaaacattcgtatcagaaggcaactcagacaactccttcgatgtaagctgtagcatgcggatatcgcgctgcttggccgtcatatgagccttggtgatactgatctgctgctgcgaggagatcgcacgggtctcaatctcctggaagagctgtagttgtttagagccattagcatttgcttgtctttattggaattgacgtcctcaaccggaaacagagacaagaggctgagtgagaccgaattggcttagcacaccgcttcccatgaccacctgctcgcggtatccgacccaaatatgtaaaatgattaagtctaagacacaccttctggagagcttcgttgggaatcgacatcttggctgtggattgtcttcggagcttggatgcggttgaggggtaggaggtaggaggggtgcggaggacgggcggaggtgaatttgttttgttgtggactccggattagaggtttgattttctcgctggaggaaatgggtatcgatcgattgatttttattgaactgtttcgcacgggtgtctctgtcaaatgtcttggtcaacaggatcaattcgacttgctcggcgaagccttggggttgaggcggtgggcaagcggggcggtggagtattgcctgacttagggctcgaggtatacgagaggtgtgtcaggtctcagagagagcatggagtttgtgttgggcaaggcagattgatgtgtttatctattttatgtgcctctttggttgaaaggatctaactggattagatcaaggttgacttcagacattcacactttatgaactgtctaggaagcgcaggcgcaatacacttagagctccttgagttaaaaagagaaaaatgggacagaggtctttggtattcaaaccaatttattagaaagaaggacctatatgttctgtctagcaggaacgacatattcatacaagaattgtatgcaccaagctcatgacagtattttggacttgaatagcttcattcgaagtggctagtcccattccaaatctcataaataagaaatctagcagttttgcttcaaggggctaaacaagtttgcaaaacctggcgagctcataaagacatggaaatcactaggaccattgcccatcgggaccttccagcatatggcaaccgcacgtgaatctctcaagtagcggtgtaatagagtacgatagaacgagacatcataatattccctgcaagccatgagatccaagatctgtagggacatcactgccctttacagcatgtgaagatccgcgtaggctaactaatctaagaccggtgacaatctaaagcctttacctaatgtctactggtttcaagatacggagtagagagagatttgaatggatatttgctaaaaaaaaccaatgggcattaaaaaaaatcacgattcctcccagtgcataattccttcgacgtgaaaatatcagaaatctaaagaccagaccctaagtatcgaatcgatttccagccagatccgaaatcaaatgaaagtaagacaaagtccagattgatgggcatgacagtatgaaaagtaaaagaccgaaccaaggagattattcatgattcccgtacgcccagactccgtctcccattggcgtggccgactctgctcatgttctcatccaggagtacagcagtaagttggtcagccaattaatagcgtgggagactatgaaaggcccgatagccatgggcattgcttgagtgcttagtagttgttagagttgggctcagtggagcaccacatctcgaactcagagctggtggggtcagccatgctttcatggcgagccatatcccatgatggatctcggccttcgaggctctgcatactggggaggtaggcagaggtcatgctggaatgcgcgtatgaaacggcgccggaagacatggccggcgccgatgaggctgtgtaatagccggttggagtctcgtcagcccaggtgtatgagccagggttggcataggaaggagcggacatggcggaaactccagactcgccgttgctgagaagacgggggtccatgtcgtgcatggggagaccgtgcgagtgagtaagctgaggctggagcaactcatggtgagtggcaccagggagaccggcgagggaagagccatatcccatatcctgttgagggctgttggagcggtagtgcatgtctccgtaggattcggtgggctgcatcattgggaggccactgggatggcttgtgttttgccaggaagggtgaatatatccgggtgtcatcataaagtcaggcccaaatggtgaggaatcccggctactatcgtagtaggcctcttcgaagctttgggatcgtgagtgggcgtaaggagacccgcgatacgtcgtcgatccaaggtcactttccatgtcagagaaaccgccttcatcggcgacatgccctggtgtgagggcaggagagccactatcacgtcggctggcagtggctgcggctttgttgggggagaacttgtagttaggatgtgttgcggcatggttgtcacgttctagcttcgctagatcttcgtatttccgtcggatctcaaccggctctagcttccagccctggccagcgatcttggagacgatctggtggttgttcgcacccactagtcgcttggtgcgctcggcatatgcagaccgataaagcatgaaggaattcatgggtcgagagatcttcccgttcttcttgcggacctcgtcctgtcgctcagaggccgatcgagagacccaggcgtccatgtctttgataggagtagtgtgaaaagattcagtaagctgactgatgggtccctcaagctggatacctgaatcggagagttctctccggttacggttgcgccgctgtcgggctgccctgactggagcgtctctgactggtgttttagcacgagaactgggggaccgtgaccaagctggcgaagaggtcctggtaggtgaccccattgggatgagatcttcatcagataccggaggaggcgtggtgacctggccagacatgatctatcttggtcagtgtcggtcaatggagaaatgggagtaaaacttaccgattgaggaggcatgtgaggataaccggggacggtgtagaacggaggagacccgtagtgctgagatggttagcattgctatgaggcaacagccagaagatcagacttactatttcttggccactgatttcaccagacatctgcatgttgatgcacactgctcggtacgttccaggaccttggaaggactcttcgggcaagggatgtccgtctgtagattggggaggtgtaggaggaatgggtcttgcaaccaaagtcattgttgtgatgctgatgagataggataaaaagaggatatgagttgaaagctagggaggaaagaagagaaagagggtttccagaaagaggaaagaagtggaagaggtgtagaatcaagatattctctgctgtcctacgcagacgggtttgtctcgcagttacgctctcctgaaagagaggtctcaaacacgactgcagatgcacccgctggcagttgagacacgcactgcaacaatccaattggatgtgtggatgtaggtaagtatgaagaccctaggtatggagatcaagtggatatgttcaaagaggaaagacaaaagccaaagacttggatattgccgattgaaagatgggcgggtctcgcaataaatagaggagaggggagagcaggcaagtagccagagaggctgaaacctccagaagaaggcctggaatacaatccgcactctagttctggatgtgattctgagattatttggattaaatcgaaatagaaatgcaatttaatattctcattaatggaattaatcgcattttccagatttatttaattggatttcgcttttctttatttgatttcctttcctttcccttttctactctaaatccagtggaggcgttcatggcagattatttaccactttggtcctagtccgtgctattggcgtgataggctgcatttgcaatattccattcaatgctgaaatagcatggagatggatctgtgactgccctatatctcaaacatattgtctttgtgccaaatttggacacctacaaatagcctggagagaaagaaaaagcttcggctgggtgacgatgtacggctccagtatggagccattgcactagggcagaccatgggcctgtagggtctttccaccgcccgagacccggggatgcaataggcccgattaaaatggaaaaggagacatccggagccggggtaggtggaaatgtaaatgtagtgtgatcttagcttggatgcagggtcgttgggatatttcttttttcttatttttattcttttatacttgacactgacactgacactgacattcgaaaaagcaaccacggggaagcgtatagttagcagatgcaagtaaccagaaagacactagctcggacagaaacgggaaaatgaagcactagttgcatgccatccgttgctgtcaagcgcgatatacgtgatactgtacggcagacgtttagagaacgtcgcagagtaaagccaagcctgcaagacatgcgaaggatcatgacaataccagtaacctccactcgctatcacaccgattcgctcgtctcctccgtacgagtcatgaacgaccacttctatcgaggcatatccggtccaaccaaccaggcgagagaactgctccccctcaaagttccccagtcagcctgcgccgagcaaaccatggatggctatgcagaaaaaggcagcagtctcgacggccggtgtgtatcattgggtcccggggattcggggagtcgggggccctttttcccttttccccttctgccgtcttcattaatgtaggtctgagcttcggggggaaactcttgtcccggtctatcgcggctgtagtggagtgggcccgcgctgatcgacggtaacctgccatcgcgtccagggttggaatcgatatcgtgaccggcaaacccaccaagtccagaccgccacatccacgctgattggctggcttcgaccggcgtaataaatccggcgaaggcccacgccaggaatggctcgattgattgtggcacgggggccatttgctgggcgtgacctgccgtgccctcattttgactactgctcgggttcccttccgtggatacgtctcggatcgtgccatttcactagatggtacggggtcgattgagatttaacttgcacggaaacgccgatctataatttgtaatcttctcatcggatttcggcttgtccaggtctccagattcatccgtcgatgttaaaaatccaacgccacgggaagtcatgaactcattgaacgcatggaagatctccccgaccagtgcttgtcagatctcgccattccatacatgcacggcggttcgcgcttactcggggacatactctgaactcatttccagatcaagattagcagatacgagcaattgctttgacggtgccccaggccagaccggataggccatggcatacaaggatgttgccaaagactggatgtggctgtttacaagtacgacgagcgcaccaaccaagccctgcagtttttctagaagactatcatcccccgcggactggctcgtgggctacttgggaccttggacgcaggaaccagccacgttattgcatgccctctcgccgtgtggcagtcttggccatgcatgttttctttgtctggccctcccccctgtccttgtcgggcactcgaaaaccgcctagagggacgcagcacgtcaatcaattgctagaatagtggagtgtagatgccatgtgtgatctacaactgttgaaggctgagacctgcagcatgtccatgtgggctttacccctggctcaaagaaggtggggagttgatacaagcctgcgcattgagcttatcttttgacctttttttaatccccaggtggccctgtaagcatcttattcgtggtccatatgccgggatggtatggggctgagccaaaacggattccacgtgtttttgaatgatcaaagcgatcaaagaaataacattgagaccgtaaccaagctctttccgccgactcggaggaaagtatttggactcactttgtagtgtttcgtataccaatcccattcgatagtcgaaacacctccaatgccttgtccttgaagtcgtacagcccttagctttgatgcagcatatccttaatccaaatctctaggaccaaaaatgagggatcaatagagtattctccgccgtaccgggggatcatcggtgccaatcactaaggcgctgtcaaccggaatttcaaatcccgttcccaacaaggctaatcgacgacgaatgaggtgctcaagcgtccgagccattgctgcaactggctgcgcactcacgaactcttctctatcacgtatgaacccgattgacagctaggatcaccccgctcaagcctccactgatttccttcgaaaaccttctagaagtccagagccccgacagaagaggataagccccaactctaaccgtccgttggtcgcagttcagtctgctgactcgactgcgttcggattgcacaatgtgcacagactcagtctgaccggttaacggcgtttcatgtcagtccttctctttcatccctgatcgcctgtccaagtgtccaagtgtttcgagtgtttctaaagatatcctcgtttcaagttattctcgcgttcattgttgctattttcatagcgatagcaatgatagcatgggagaaagagagaaagagaaaggggccggggatcgatcagcacggggaaaggagatctacatttgataatgaaaaccagcataaaagaagggtgaaggggcggactagcctcagcaactttgttactcacattctcattcgatgccatctagacatgttccccgataccccgatgcccatgtccgataccctgaaccttgcaccctagtccccatagtcccacgcctttagcaggggccctggtcaaagtggccaaatatggctgctgctcttgttatcttgcgatctgcctgtccttacctaacagataatcggccatgaaagggcctgcgtgtgtttaacttcgggcgtagctgcattcgatcaccacacacgaacgccatgccacctgttgaccaggttctcgaactcaattgcgagttgcctcaccacaagtcgaccacggcccgcggtcaggccgcgatggattacgagagccagaaagagcggggagaagttgcacaccgggattgacgaaactaaaaggagacccgtaggccgtagaccggagttagccagcagccaacggtaaatcacgcgcaaacggcggatcgtcatttgacgttcgcccgtgggccgtgatgggccttgactcttcttcgagccccatacaacctaactctatcctatcaaaccctaacctttgagaaaactatcgtggaaaagaaaaaaaaagactaataatgtccccgacaagcgacgaccgacatgggtggataagatggtgagatcagatctgggttccccaattcccagaccgccacgaggcaatcctcctgcgcaaccttacacaacagcggctagatttaatttgtcatgcttgtataccggggtctgatgcgcttgatacccaaaggggagaatgagctgcgtgcaataatctgcaagcctcagccatatagccaaaatatagtcctggcagcagccaacagttgggatttcctcacgattggtgcaaatttgggaccgttgacggtttatctgccagaatacgggcgacgaactatgtagtttttgaggcgtccttcgtgctgcgtacggagtactccgtagatgcatctcttgtcctgcgctatttttcctgctatcacaccttgcctgttgtggttaatgtataagttgtagaagtcgtgttatccctggccaacattgactacacgtcttcgttcctccccctcttccctcggttttctctcttttaatattttattttgccaattcccactagttttacataggggctgtaatggacgtcgatcttcatatcgaggattcgggggaatagactttgcatcccccctcagatgtggaaagttgatatgtgtgatttgggtgtcacaactctaacgcccgacgacccgttcctcggagatcggactgcccgagacgctaggtatgtttcttgtttctgattgattaacttgtatagactgacattcgcttgtattgtccaagatcggtcgagatggtaccgtgtttcctacgagcaaagtccaggctaagagaaaggagtcagagagaggctaccaggagaaattgtcggagatgctagatttggattctcgggtatagcggtctattttctgtgttctctgtctttaccgtggtcaagatacttgatttgattatcggacgaatgctttccatggtcaacattctccgcggtcaacaccagttctccaccctcagaatcactgaaatcaacaagtacaatctaacgcccagagctagccggatgaaccgagacccgatcactaatactagcaactcaaaagtccctatggggtactggtccgtaccccggcccagattaaccctagaggaccctagccccatcgaccaggaccctggtcggcttggcttccggtcacctgttcagagatcgtccgcggacatagctatctccggaccatccatagccctactgtaccttttacaatgtacgttgtccagatatgacccgatcggcgagacgcgttactcaatttgtgcaaatcatggacattagagttcgccgaaagctgaaatccatgactcagacgaatcagagacatgtggcatgagctagaaagggcgaggccaggcgacgacaagagcgaagatcgtgggtatcagagtttcgcgcgacgtatggcgatagtgtcacccatccgtcacatccaacggcgccttgactacggagtacggagtacggagggcctagtgcagggtaggactgctccactgcgggtatcggtgcactaactatgttgtatcagtgggttcagtatgcgggctttcggctccggattctggcgtacctatgtcggtactgattctcagggaaaacggaacgaatacgggatacgaggggtttttctctacgcgctaagagaaattaatggctgcctcatcgcgaaacatcctggtcgttatccaaattggaataggaatcccgatcttcaatctgtaggacgggttgggttcctagttgggtctggtggatttgaggggcaaacgatgggacagagggattctccgcttgggaatatgaggagttggctcttgaagcaggggccagtgcttggtataatattatacttctacaacatataactatacgttgtagaagtatagaagtagatattgtacctgatctatgcatatggtggagtacgtactttgatcaaagaaagagatctccaaagacaaatgcaattgtctttcctttcgttcaaggaaactagcctactagcctaatggcttactggcttactggcgtagctaggtagtggggggtaagtagtctgtggccacccgtgtcgttgacaaatacttccctgctcgcaatccattcttagacttgcttttctattttatgttttataatcatgacgtctgtattcaaaatctgttatatagctctccccatattccatagctatagcactatctttgtaagcatctaactctccagaacggcagttacaccctctgagtggccgggccggactgcgaaactccactctcgctgttctcccactttttcttccacatttccagacaagaggctatgagctgcatgagtggagaaaaggatcaagaacgcttggatcatgatcgtgtctgccgtgtgaacctaataatacgtctatgtgccgtacttagattgccctaagcttattctggcaatgccacgaaaggagctacggagttatgcagtgtggagtacatatggagtacggagtctccgtaacgaacagactaaatctctagatcccgaaaagcgaaccccgggtctattttctgattggatcggtaagcttcattttaatagctaatcattgccttccaattaatatagttatccgtccctggcggtctcgattctcagccacaagaaggcgaactaagtggctactccgcacggcaatgagacatacaatatcatagctacaataccatagcgggggattcgggatttacaactccttcacttgatcgtagatcttttggtttggacataccttggaacgtatagatgtgcagatatagttagtcccagatctgatcttgttgaacatcgggagagaaaccatggtaaacaggtggataatgacattgacattcccattcacaccggagctcgccgtctgtagaatccggatattgcggatattgtagtctatggggtatacattcgcctgtgttgggttcatttccctaaatcgttcattttattagaagtttctctattttcatcattagcctaagtactccatacaatccacaatatccgtgcccaaccccctagagtaaacttatgacagcaatgacacattgacaggacggcagatcaactaacaactaactagttagtcctgttacctgtattacaaacccaaatagctgagatagggggcaagggatgagcatgccgctagcgctacaacatacacgattcaatgcatgatctacgtcgatcgcctccggttagcgcctgggctaatcgctcgcaagtaggatgtaagttgactgcgccgcatgctagacccgaccgagtaggctagatgctatcgccatactttttccaacggctttagtgtatcggtaatatgtccagagtcgtacggcgtatccgtacataggtacaatcgtggagtttgcccttgctcatagtcatcgggcatctgcctaatcctaatacatgtggagtgggacatgacgatgggcgggaagaacgttcttttgtcactcctttttttgggtctctcctttttgttattattatctccggagccgatgcttaggctctattgtgtttgtggtaaatgaaatgagacaattaagtaaagaaatggcataatatgattgagagacaggggctggagctgcttcaaacgctgtgagccgcattccgtggtagcacggagtactacctagctaggtatgtatgtagctcggtatgttagtaggcgtatacggttggctgtgcagctgggtaggactgcgtttaggtattgcttttgcagcaaggggtatatgtcgatcgacgtatcagtcgatttggatctggactgggcgtcagacttttgtgttgacgaccacgttgttttcgatagtcgataggatggatatgcagccatcttgtaaaggaagcagatgttgatctgctttatttgatcgactgaaatggtttacaataggttaaactgtaagcacttagtttactggtttgcatatgtggctctactacttggacagggctgcatatatagatctaagatgtatacagccttgtccaaacatttcccatctaccttccatcaacttcagcaagcaagtagttcacgattaatatcaaataacattgtctattaaaatacacttctccttgtccaccaaatggtgcccagggccagaccatctgaaaacgccgctcgagtccccatccatcttaatgcattgtaaaacaggaaaggaacaaacaaaaaagggtctcaaaacgccagcccaccacagtttcaagcagccagtattcccacgagacagacccccgacacgaacgacaaggggaaatctcgctttcaaaacacggccattcaacaagtttgactgcaatcgcagaacttttggaaaaggcaaaaggaagaacacaagaccacgagcgtccaccaggccaagaaggcttcgttagacagatatgaagttcgatgtatgaaatgtcgtctccaaagggaaaatgactccggatcgcctggaaaaggataccggatggataccattcgcgcacaatgatccacttgcgcaacgttctgcaaaagctaaaacagacgtcgaaaaacagtgcgaaagcacagatcaaatctgctcaaaacgcacggtacgacttgtggctttgggttccgatgctttcaggatatatccataacggtgattagatgttcgcagactcaaaaagccaagaaaggggccaatagaaagggtatttggaaaaaacacatgctgttcacaccgttgcgctagaaactcattggttttggccattgctttcacgccgaggcgaaggaacaggatccgggtactgggacgtcccggaggccaagggaggaatgcgactcagcgatggtgacgacatcagatgctgtccattgctctggtagtggtggctctggtgtagcattgaagcattctctctcagccggcgttcctcctgctcaggtgtcatgcacttgacaggcggggggatcggagcatctggggagctgcggcccatgagctttgggctcggctccagtctgcggatgggcggcaggactggtgcgcctgccatgctactgccagtaagcggacgaggtgactgtttggtcgggctaattcccgacatagccatgccgtgagaactctgaggaggcgaagagtggttaccgttgggcgtcgtggcagagaaagatggatagtggtgagacatcgacggagtagctgtatgacctgattgcggacgcggagtctcgaaagaactccacggagatgtatggcttgaaacagacgggaagccggcaatagggccaacctcagggttgccctgggttggtgacatagatggttggttttgaacaggactttgggcagagtgagaggaggagggccgcacagggaacgatccaacgggcggaagttgaggagctgattgcctaggcgggaaggagtgctgagaggaggatggccgcgcgtgctgctcggtggtatgcagcaagcgattcatgccctttggcggggaaactggtggacgaggagggcttgaagatggaagggaagtgtgatctgtgttatggacccggcgctggggagacgcaggaggatagaagttgccatgactaacagcagacgagtgtagagtgggttgtgttcttgagggttcgttttgaatattagatagagccagatgcgatttcttcacaggcgagggcggagcacgatcttcgtcatcctctaacttcagcttcttaccgactggaggagcagccgaaggagatgctgaggcgctgacccggaatctgaggggtgggagtttgggcttgatggaatcttcctctttttgcttgcagtctcggcagacaaagtgaaagtcttccttttcggccgcttcctgtgagatcccaagacacttgctatgctgccaaacattgcatttttcgcaggcaacactgtgacttccatcatcctaggaaaaggttaggctaaggctcaggtgcttggagactgaaactcaccaagttctcgccatacactccacagccagagcaatcaaagatccactgatcatcttgggtaagccctgccaggttcttctgggacttctccaggtcagcctggaggtttcgggcagacaccctactttcacccctgtcaattctttcttgttcttcggcgatcctttccagctcagcctcatgcagcagtcgcttctgttcacggtctctgatgcggtgctcgcgagtcattgtacgcgactgtcgatcttcttcaagctgactttgccttgcctgctccttacgagcctcggctaggtcgttttcacgcttctgggcggcttcggcagcctctcgatcctgtcgttctttttcttccttggcggcaagtcgactagatctcttagcaccggcgacaagctgcatattcagaagctccttttcacgcttctgacgcttgcgctgctgcgcttcctctgccttctcgaggataggcaggacatgctcaactatgctatcgcgtaggtatttctcgtccgcgtccttggttttctggattgtctccaagaaagcctggtattcctggagtgtgacagccacacattcccacttgaaaggatctttagagaaggccgcgacggctgcatcgttggtatccttgctttcctcgtcggaaccctcttccgccgctgccgtagatgtacgctttgacgttcttgatactcgagaagaccggctctttgccttcttcttgggacgctgaggagggggaggtggaggagggtcggtgcgacggtagaggcggttgtcatctagcacgtagtatgatcgcccttcgcgatcccagccaaactcttcaatacgctgggagaggtcagtatgcgatcatcaggggtcaaatctatacgagagatagcttacccattctgtctgctcggtttccttcttttcgggcatcttgtcgcgaatgcggtccgcgttccagaatgtccataccgtcagctggtggaggacacggatcttggtgaaaacatcgaaatacaggaacttgtttggttcttcatcgtaaccgaagggattagtgatattaggtgctttcgcattgtactggcgtcgggtgtattcatcgaaattgtcgaatctgccaacatagtagtgtcagtgagactcaggataccgagaaatgtgttccagtaaacgtacgtaagaccgcgatgcgacgaaatccacttgaggagacacaatccaatctccagtagtttatgagagggctcgggtttgagacattcgacttctagatcctggcgggggcaaaagacatcagcgataattcaatcaagtgagacctgctcgtgtattttctcatcaatgcgacaagaagcgcacagcattgatctcagtccagaccatgctaatagacatacctcaatcccaaagtcctcgtcaatcttcatgacctggccaaagatagcaatgtattgcatgaggcttgcaaatgcccagttgctcctaagctgtgaaagcaaaccaggctcttctggtgcctgttgctcggccaccgaggcgacctcggagtgggtgcgctttcgcgatcccatcgcggcgggacaaccgttaaggccggttttctcaagggtgtcaatgagggggttccctggaacgaaaatgtggcggagatgaaagccagagagtgtccaacttccaaatgagaaattcgagcgtaaaaattgaaaagggcctaagaaatacgaaggttgagtctgcactttttttcgtgtcgtgaggcaagacgatcagtaaggcggcgcgtcaaggaccgtgtcacgtgaacagatgcgtttgtcgaatttagcaaggggagaagggaggatgatagctgaagaggaaatttaggggatcatatcaaattggtctaatcttattctcaaattaaaagggatctatacaatgagattatgcaaacaatggaagatcgaatattcatgaatcggagacaagtacatccatgcttttgagaacaaagtcgcatatacacaagtgaaaacagaaaagaaaaaaacaaagcagacgcctggatctttggatatctctcgctttcaaaggtctatctcacacagagcagttggggttcgtcaaagacgaggagaaaatgcacacagacgacagcgccaaccagaattcgcgccacgacagaagagttccgtcgaaaatgaagatcaatgaacaatcagaagaaaagaagcatattcccacaagcaaaatgcaaagcaaagatagaaaaagaagaaaagaagaaaaagaaagggacaagaatacattaaacctcccccaacgcagattaccgaaccctcaagaaacccagtataaatgcggtaaagagagaaacaaccaggaatgaagaaaaaatgaacttggatccgatgccctcaatcgatgacatacctcatgcgctggatccatccagttcttcaaccacaattttgcgccttgtgtccgttaatcgccagaagcctttcccatgcatatcataaagtaaaatatttcgggagaaagaaacagatgcttttcgtatgttacattgccggggctccatccgagacagtgtcggacaagttgataaggagttgagccaggcagcgcttggtagctgcatcgtcacggaggactgaggagaaggtggcgtcccggagaggttcggggagacattgccgcaaggcctctcgggcccgactgttgtcactgagactgtatctgttgttagagacacctatgaagctggatattgcacaaggactcaccgaaggaagcagcgcacaacatgcttaagaaggcggacagtctgttgctccaccaactgagtaaccatgttgctcaggacagtgcccacggcatagaatctttcatatgtggcgcaaatgtagcccaagcctatatcatcaagaagaattttctgtacgataaagatagcgacagttttgctcagctctgagcccgtttccatgatgcgaaggcagagagggataatctccgtagttaggaggaagttgatcacgtcagacgagtcattcttcaccaatgcgccgataacgcccagcgatgttagtcggaggtattcgaagggacgagacttggaggtggtgttgaggaacgggtagaggaaaagagggatgtgagctgaacgaggaaatatattagtaacctggtttgcacgggtcatgataaatttttactcaccgttcaagaagagagtgcgggtctcattgtgggaggcaacgcattgcaaaagcgccagcgcattgcagactcgatttgacgcggcggcagtcaactgagaagggttcaagagtggatataccgagatgatctcttgaaggagtgcagtcatgacacctgcaagtttccgaccgttagttattgtagacagggctgggcgcacgttgggaatggagccataccaaaagaatgccagatgaccagagccagttcggggacctgctcccgcttcttgctcagctccatcaaagcggattccctgcggtttggatctaatagctcggcgacccaaatgaagaccttgcgattctcctcgctgattccaccgtccatggcggagaccgcatttgacataccatctccacccatgccaccggcgccaccggctccctgcgcatggttcccaccaccattcccgctcatggcaatgcggccatagtgttgttgctgtgcggcggctgcggcggcttgcacctgggcgtgctgttgggcgaccagggaagcgtgctgctgctgcgattggtgtgggtgcggctgagcctggtggtgctgttgctgttgctgatgctgcatccacgaagggtcggcctggggatattgatgttggtgggagaagacgtgttgggtctgcgcttgaagcatggtgggtgatgagtcgtttcggagactcgtaatactccgaaggatcggaactctagcgaagcgacggcaaaattgggtctgggataaagttgaaatggggttaataaggtcaggagtttaatcctgagactgaaatcattgatgactgaagacaagttgcaagaatagtggtagaatgggcagattgggtcgaacaggtcgaacagaggagtgtggaggagggaaaaggcggaagtgaaggcggggagataaagtgcctcccctaagttttgtgtggtcttttttggccctgggcatgtctgtcctactgctatggagtccttgttctgtagctctataattattttctttgctgttctttatcttttgtctcatttgactcggattgaatttgcattattggtgttgtcaaacctgcagggcatccaaacagagcacattgttttctgcaggccaaacagctttctgcagccattacgattttccatgcagttccaaggttgctcatagttatttcatgccggtgcccggggagcatttacagctatcagacagtgataaacaagtccaagaatcatattctcgtgtcgggtttgtactcgtaatctcatatgtacatcgtagtgccaaacataaatctcatatcgacatcgaaacagggcaatatcgtcaatcctagatcaaatccaaaaaaatcatagtgtaaatcatagtgatacatcagtcacattataaatgcagcgccataaatgcataatcgaaccgaggtcgtcgaactgaagacagaagcgacaagactctatcatggacgggtgcgcgactgtcgtgaccgtcgcgtatccctcgttcgtctgtcagaacttcggctacctgtgaaagagaaacgtcagtaaagatccttcgttatggggatatgtgggggcggacgcactactccctgagtaatagtcggaatagtagtagtatgaacttgggtaggaggactcggtcttggcgtcgtcgtgctctctcgatctcctcaatcccaaacatagagcaagagcaccgaagataatggcaattgtgccccagccccatttggactctttcttttcgctaacgtcgctgccttccgcggctggtctggatccgaaccacgttcgccgggcaggagcaggaggaggccgactaccatgcgagtggtgggaatggcgctcttcaacataggttgtttcctgtctgcggcgcttcttaccgatgccgagcgctgcaagcaacccagccaagacgcccctgaagcagatgcaggcgcagaggagtagcaacaagaacgcaccgacaatactgccgatgacaattcctgcaatggcaccaccactcagtccgccacctgaggcttgggccccaatcaaatccgccccgtctgttccaaccggcgctgtgaatccctccgtggtggttggggcagaggttgccgtcacggtacttgccccattgctcgtccctcgcacgcccggcgtggcttctgacccggaatctgttcctgtagcagtagcagtcacaatagccgaagagctttcagcgacacattggccattgtcacattcttgcgcagcgtcgcaacaagtcgtgccgcacgtcgtctcgccgaggtcggctctacacgtgcccgcgcttgtagtagcagctatctggctgctccatacagaggtaacagttgtgaggtcggtatttgtgagcacgtaggtcgttgtgtaatattgatagtccccactgctgctatctgcacagacggcctcttgggcactgttggtactgcacgtctgaccggtctcacagcaaagccagtcattatagccacatggattatcgcagcgcttttcaagcctgttttctccgaagatgtctgcttcagctgcgagcggggttgcggctgcgtggagcgcgtagttgaggagtagggaaagtgtcgagagcactggcaggacggataaagatcgcatcgcaaagaaaaagcgaggcaacgcttgccaaaattcagtggtgaaacactcgaatcggagagtctgtggtttagactggagcggtggtcgtagtagtcttatctcactcgtatactggagagatcttgtcgatcacagacaaagatcaccaaatttttgaaacgtcaagatatgatcggaatgcagacaaagaataaagaagaatgagagaagtcaagagaaaagagttctagtttgttagctacacaacatctcccagcctctccagtatacccaaccacccgatttcctaccaatcgcctgagactttctttttatccggtggctgggactcggattaaatgagatttactgcattccgattagcccaacgctattttccgcctcgaataacaagccctgggttgcccccctaccggcgtcctgtcagaagcgatcaacgggttggatgcaggttccaccccgcatggcagcaatccgcttccaaggctatgtccaacaccgccatttcagaattgccatgactcaggtctaacactaaacactaaagaggaacaatccacttgtgtacgttgggcagccaagagtctcgtaaattgcagcgaagcgtggatgttgtggatgtcggatattccgtgccaccaatggcagcccaacgatgaattgtccaatccgttgaagaccctgacatacgattaaacaggcacaggcacaggcacccaggccccggagagctgctagagggacatcctctctactttgaaagcgatcaaagaatcaaaacttacccaagagaattattctaatcgataattactactctgtcatgccactcccttgctaggatggttcttttcttgctacaacatacaacatacggaaatatctctaacaacccatggttgcatattgaccgctatttcgatggctccgaactagcgataatatcaatgacccattccattccatgggaggtgcaagtgcggtctgccatcgcccccgaagagtgtcttaggtatcgtcagactgcttacgtgaggtcatctatggatggcgagactcctcgcatcgccaatattggccaaattgaaaatgtgcttcggactatccacgatcttgctccctgccgcctcatgtcaagcatcctgccgaagccttgaggtattcttagtctgcacgtctgccagttggatgagattttgaacccggctacataacccagctggcatgcggactggatgcgacgaactgggccgagtaagaagtacctgtgcaatgaaggaattcaaacaggccctgatgttgcggagcatatctaatcaatttcccactgttgacaataacgccatcaaccatttctatgctcgccaaccacatggtcatggattgaacagcaatatgcagtctagttgtctcatcttgaattgttactgtctaatctatggtccatcaccaacttggaatgaatcccccttgatccaattaccgagatctttaggcaattagtttgacctgctaaaagatatcctaggaatgtgttgcaatgagctttgggaaatacttatgaatcagccaaagacattcctttgcttgtaaataacctaggaattatgtaactagtaccaaacatccagcttacacggagaaaaggcgttcgtaattatggaatagattatcaaactatgtatcatccaatttcacacattcatcttgacaaacaaacctcttactagactctgccactgtcttgtccacacatatgtactccgtatagttgtaggcggtcattttctgcccccaaacagggattatattgaactttaaggatgtcttttcgcccttcggggcatatggtcaaatgaaaatatacagagaagattagcatggcccctgcactaaggatgacacgctcaatcaaagagaagctacctattttttttcttttacaggtcctttttgaggttatacaggtgtgggtcattttgacgcggtataattggtcttacgccatcgggaagtcacgtgcctgtctgatctccacggtgggtgtacgaatcccggaccgcacgaaaaagtggagcatttatcaccaacccacggtcaggtcatggcggctctgtgttatagttgaaaagaatgtcgtccagcctagatagtaataagaacaaaaaccatgacaacttaacgtgcgtatatccttttcatgaacttaccagtatcaaatttgaggttattcccaccttccttttgcttctggaatatctgttgaaaggtcacctgacctccattgtttgctcctgctacttattccacaaacctgtagatagtttcttccttcttacccgcaactgaggtcttctataagtcatatatatcatcgagtgggttctatataagccctttctcaacatccttcatatactttaccccattcttatctactgagtcatcatctatacatcttgggttaaaatatcagaacttcatcatcccactatctatacataaaccgagcaatgtgagccttctggagtctaggatgaatgtatctctgacacttgaacagcgagtatatcgaaggattctacctgttccgacgtgggggctcttgaaccacgcggtggatgagcccgtcgaatcggaatggcatccaaacactcggtgcggtgatagcgactacgaatatcaacatccgtcttggtgatcacaagtcggcgggtacctcttatcggaaaccccagatatggcaatggtcttgcgaaaatccccggtagctctgacggtcgtcggagaaatgaaggtaccacaactgtcacatggaagacggcaagtttgtttcctgtgtccgcatcccgggcatgggtgtctcaacaattgccattttggcaaccagaaccaccgtcgcgattgggacgagggtacccaaaagaaaagaaacaccagtgaaacaagaggaagacgagcagcttgtcaatgattcgaacctgaaaccagccaaccgacaatccaggcagctgcagcgggtatagaatgggccatagtgcataccatgaggacgattggacaaatcgttaatgagtctctgctgaaccttctcaaagctctcaccatgaacattccaggtgtgtcctattgatagttgctgagataaaacgtgaagtcaaaagctgaagcctcacctacttaggtccacgggtcggatgcccaattggctaaggcacaacatggaccggatctcgtttagagtagctctcgccctcttctctcttcctcttttccctccctgtccattcgcacggaaccgaatcagacacactgtttctcattatctacactatagcagattcctattatctagtaataaaaaagtcgaagcagtcccgggagatggcatcgaagggacatcgaaccaccacaaggaaggaatactagattatgttttggttataatgaagacgaacgtcgtgcttggggaagttcagatgcaaagaggtgatgagtcagggtccatcgtgtcccgaagatcaaaggagctggggccgcgatatctgagaagaggaggaaattcggactcggacggagaggttggagaggaagaatattcagcgagaaatgggaattaattcagacatgcaatattcccgactcagtaggataaaagaaaagtactgtctaacccaggaagaagtcaacggaagaatatccagatattctcctcggagaaccggtcgaccatcttgagcgtgatattgaacgaagacccatggggaatggggtttaagcacgggttcaaaattcaacgctcgggacggagtaaaaggaagggattcgaagagtatcataattctaggagttgctccacatggcgatataaaatcacaagaaaaggaaaaaatatacaaatcaaaagaacgtattcaaaatgtcgtttcagatccatcaatcatataaacatccccgcaaccccaaccgccagcccaaagaccagatcatggagactcgacatccgcacaggagaggcatcattcccattcgcctccgcactagcagtctgcgtggcaacgctgctacaataccccaaattgataccatggcaagcctccaaactcaagctcgagcaaatagaagtcgcctgcgacgaagccgtgacagcctcaaccgtcacacctcccccagcgccgtcaatagtaacaccgtagcgacccatcagcgcgccagtgcattgtgtgtactccgactgacacacagagtagtaagatgagcaactctcagcatttccaaaagaagtcgggacgacgacaaatggatacgcggcgtctagcgttgagccggttgcggacgtctcgccctcggtagtggtggttgcggttgcaccgctggggaacatgaacgcggtgcctgtgcctgtcgtcgttgttcctgttagactgccggtgcagcttgcaccgctcgcgcagcaggcgatgttgttggcggcatcgcgggagcagttcgttccctgcttacagcatgcgtcgccgttacccagatcggtgcaggggttgtagccgctcggacaattgttgtcggctcgtctaaggatgcggaggacttcgaatgcccgtttgttggctatggctgcttctgcggcggtgaagggtgctgtttttgtcgagtggacggtcgaggcgaggaatgtggcggcaatccagatccacctggaagtccgcattctcgggatctagggcggggttggaatagtcggtttggggaatggcctcgagattttggttgaattgggtgagtttaatggtttattctcatgcttcgtttcgtcgttggggtcgttatccggggttgggctgggtgtcaacaaactactcgaaagagtaagattagctttcaccggtcgcgatggtgtaattgaggactcgagacttgaaaatacctgggtacttgctgtctgaagggagattcgagggattctagaaaagatcggagttagagcacaaatgatgtagttcgcaggtcgccaggtcacaaatctccactgggatgccccagcaaccgcagcccgacactctagatcggaagcccaagcttagattaatttttaggttaatttctattgacgagggcactggtagtaataggtagtagaataattttaataactactaaaatataatctgtgaaacaaaacgtggacacaattcggcactcgactacggagcacgaagtattgaatatacagcagctgaatggctgattgggcatctgaatattcaacaaatgagtcgggcatggatgttaccagtcaggagcaatccagtaattcttcgcactatctatatggaattgatcaattgttccctctacgccgtctcttccaaccgtccaaacaccactttctaccagttctctccaccggtctatcagcctctccaatctttgagcccgtctttcaccaccaaacggatggaaaataccatgttgaaagagttgtgtgacagaccctggcgaaattgatgtcccatcactcattctcgctccgtcgtgatcccagaaaggtagcagtagacggaagcccgcctcctcgcaatcgtattggcaccgccgcaccgactcactatatagccccgttggaataagatcattctcgtcgaatggtatctcatctccgggcgcaaagaaaagccatcgaatctcctccccgaaaccgactgtgtggctgctatctgcagctgcgaagattaggacgggcgggatattgttgccccattcctcctgttcgcgaggtacccccgtaaacctctgccgagccgtgaaagccatggtgtcgtgcggaacctccaagccgggcgcaatggctctaaaacggggagttctcattctcgtcagaaccgaacgaatgaagcactcctccggtatagacgccgcatcaagctctacgtctgtgaaaagtggcgcatctctggagacaggcaaaagcgatccagagggcattctggcttcgatagccgccgagtaccgatctatagcagccacagtactgtcaacctgactaggacaatatggaagccaagaccaaagcccgatttgcgaccgggaatttgccagttctttgggcgcttcgccctctggtgaatcggtcgtgattttaccgatccgaagcatataaatccagtgggtaaggatcgtttctagtgggaaccacatatcctcatgctcgccgatcggctccacactatccagattttcgagggtcattgggaaagcagcacggtgcagctgctggtcatagacgaccccgacacaatgcgagcctaactcaagcacagtgccataaataataacgaatcgttccagatcgtctaagtcgttgtcctcacccagaaaaatattgtcgaccaactgcattgagatatcatttatccagtaaaagaagcctggctcaggcgagaatatcgaatccaggaaggaattcactgaggggtggagtcgttcgcgaacagcctgtgtatcttcgtctgcgaaaatgaagggttgactagctaacacatcgagattgggcgtctcttgtccgtggcgggccatccatccatacgcaaccaaatagttgtgtagcctcgcacagcgctcataatcgaggggaccattgagacgtgcagggttggcctccgacaccagggcatcctcaatgttgagaatttgctgtggcgttgtattcatggtgaattcatggtatgcttaggggcgcattgaaaacggggctcaattctgccgattttgcaggtttatcaacgccaataccgtaatttatgcaaaaaccggggtttctgggccccagtcacatgacatgcctatttcgaccaggttgtcaagttgctgcatgtcttaagaggtggtgtatcgccggacagatcgatccgacgaccgatctattcgtgggggcatggaacaacgcagtggggaaattgactctttattttgcattgtttagtgcttttccagccacttgtacacccggtctgcgatctcaaggttgttcttctccatgaagaacatgtgtccgttgccatgaataccctctttgcctagatctgcgtactcaacgtccactccagcttgctccagatacttgacggtgcagtaatcgtatggcgcgtggaacgatgcttcgcctgtaacaacaagttctgggattttgcccaggttcgtcaactgcctcgctggggatttctgcatgatgcattggtcgtgatcagcgtcgattgctggctcgatggttgtctcaatattttcggcattctcgcctgcagacggttcgtatccgattgcgaggtcagtgagaccgaaagcgaaagctgggtcatttccaaacggcgggcggagcgtgaacggcggaccagacggctcgagttggacaatacctttgactaggtctgggcgcatgtctccgaccctccagcctattcaatcgttaaccacctcagcgagtcatagtgcttggctgaaatcaccatatgcacccgcctgcgaatgactgatgatataacagtcaccgacgaggtcgactagagctgaatacgcctgcgcattttgttcctcgcttatgaagcggtcggtctggaattgcatctggctcctgtagaaagcgtcgaaagttgagtcgccaatgcgaccggtgccaggccattgcgtgtgaagcttcgcctgtggccattggttgtcgttgtttgctacgtcggtgaaaatatcagagaccgaatcgggggagccgatgtacccaatacttccctgtccgggtgaccagaaggagcgaccgcgtgcgggctgatctgagaggtagactgtgtgacccttggagatgaaataggatgcccatcctggccgtccgtctggagtatcaagaaaattggtgccggtctgagccgcgcctgcaatgaaaataatgggaagtggtgggttcaccggggctgactgaggggagagcttctcgacgtaaatttgccctatcataaccattgatgtagaattggttgcattttcctgtttgacgacttagatacgcgtcgaattggtgggaatcaagacttgctgtgatgttcgtgtatcgtccgccaacgtagagaacctcgcgcctaggaacaatgtccctaagctgggagccatgagcttgcacattgcctcctagagaagcgaaagcgacatgcgtcaaatatgtgagggaagccaaggtgcgaaagctcaacatattaacccaatctgcgaaaagtgaaaagagctccagctcgaatatgtagtggatccgtgtacgaaagggtattcagggtccaaaccccagggtgacaaccccaggttttggggtattttgatgcctgaatttccacacctgccttagtaatcaatgtacaccgcccggctctgctagcatggcataaatgaagcttttgatcccatacaacatacgaatccaagttcgggtttttgccctctagaaatatatatattgtgctaataaggctcattgatgattatcgacaaaataaggctaaactaaaaatatcgttgagatacaaatgcatttatcatgtggtttgcggtgacccggtcgcttgtgaaatacattaatgtaccacaaggtgagtccgctaggtgtagaacctctcaggcattgagggtgtcgaccggctccggctgtcgcgaccggaagcgcttgaccagattgctcgtgttcagcgcaaccagcttgctcgtcggcatcaagaacaactcgtcgatctcctccagcgtcttgtccttggtctcgggcatgaagaacagctggtagaagaagcctaacgcggccaacccgccgaagaaaccgatcgtcaggccggtgtaggtcatcgcctcctgcattccctcgaagttgtatgtcacgatgaatgaccataggtaaaggaatgtcgagcagattgccatgccctgactacgggtgttgaaatcaaagctctccgctgggacgacccaggtcagacacgaatacgcgccgaagaagcccatgtatatcacgaggccggagaagaacaagcccaaggcagttgctctgtgctcattgaagtaatcgacgccgttatttgtgtagaggtagccgacacccaccagcaccagaccgacgatgaacatgaggatgttttgtgcccacacgcgtcgtccgaatctgtccatggtgaacacggcaggaaccgttccaaagaacagcgcacctccgccgaccatcgacatcagcactgactcgcggtcactgaaattcatcttggccatcaagtttgacatgttgtacatcactgcattgatacccgtcatctgtccgaagaagatcattgccgtggcatagacaagcgcccgtctgttgcgcggctgcgtgcacacttgcatgtatctattgtaccatgcctcgctggtggtcgcgtcgacatcatgcttgactgtgatttccatcgcaatgaactcgtccaagcttttggggtcggccatatcgtgcagcgacttccacacctgccacgcacggccagtcttgttcttggataccagccaacgcggtgattcaggcaggaagcacattccgaccaagaggattgtcgaaaacaagagagacgagcccagcatccagcgccagctgcctgaccgcacgtcgaagaacacacctccggccgcgtatccaatgatctctccgaaggcgatcatcagctggtacacagacaccaggttgccacgcacctcaggtggcacacactcggagatgtagatgccgacacagccgccttcaattccgataccgatgcccagaatgaatcggcccgcaaacagcattccaacgctgcggcagccggcacaaagtcctcctcccagtgtgtaccacaaacacgagatgataatcgagttacggcgtccaaaatagtaattcagcggcgtcatcatgaccgcgccggccatagcgcctagcggcatcagcgaggaaatcagcgaaatgtcggttgccagtttcgggtcctcgaggctcgtccaatcgcctgaggcgatgaagtgcttgcggatgccaggcagcgcgccggaaataaccgactggtccaaaccactcagcatgccgctaaaggcggcgaagacacccagcgtaaggactagcatgcgaggactcttcatgtacactggtatttgtgcgaacgctatccggtcatacagtgattcgctgccgagatactgctaggcctgttgatcgcgtgcctcgatctcgtgctcacgctcctcgggcgtgaattcatcgctgaactctttgcccacggtgtcgggcttttcctcatatttgtcgtgcatttcgtgtggatcgtatcagtcatgcaacaaaaattaacttgtatgggatcagaagagaaagagaagagaaaccgacgagacggcccgaatgccgctctatataagggcgtatttcgccgaaaagcctttctgcgggatgctgtacttctcctcaatttccccgacattcggcctggaccccacaattcgccagtgcacccaatgagttccttgcttttctttctcgtaaaagttagtagcatgtgtatcaactagtattgttgtggggtttaaatacagggaatgttgcgtgtcaggtccaacatttccgatcgctaccccagcatccccacgatagcaattcgtctaacgactatcaagcccaacccagaccatcagagaagaagtgttcgattataacgagagtggaagactgggagctacgacctttcgaaaggccactaaatttcaggtcagtcaaaaaaaaatatagaccctgtccttctcatgacattttttggtaagaccggaatggtcggaacaccacgaggatgtttggctcgatcaagtaatagatgagcaacgcctcaaaactctgagacaactcaataaaaaacctccctcgccccggtcgggatgacctcggcacgggtgaagttcacggacttgtacggtgttgtacctaacaactgccgattcggacggttcggctagaccggggttggctggggcccctcttgtgcggaatacggagtagtagtttacggagtacggggtactccgtaaagcacatgatacagccaaacccgatcggcgccgagaaaagttcgcaaagccggggcgctatacctaattaggaaatcattgcgctcctctctatggtggaataaaccgggaccatgcatttctccaaagtgaccggggtttacaagaaagtggggtacatttcaacgaggtctgactgtacacttgtattattctggaattctatgtgtcatgacccggtatttatgccctgaaacgaagtgagagaactggaactaatcgtgtacatgtgcacgagacgttgcaaaaaagacatggcttgactatcgaatacttggactgagacctgttccatattttgcacggagtggctatgctttcgagagtcttcttcacttgaatttgcttggcattcaaggggcgcaaccgttcaaggttgcgatcattggctggaaggtctctaatccggatgtggcttgcgaaatgagcagattgaaaatgctgatcaacaatggcagccgcctctgacctcattgtctgtggttcctcgcttgcgttggtctagaagtggatattgccaacctatgtgctcattcatggtggtgtacattgatgtctgtcagctgtctaatcagaaatttcctagttaatgagttccctcgagtgtggcctgggggtcatgttgtgctaacttaagtttctcctgagaggttaccaatcacacattatgttgcccctcgaacaaactaggctaggtcgcccgttgcccaggaatagcttggtgaccgggaagcatatcgatcctcgaacccttttaagaggtcaccacatatgttagactgaccattacacgtacaatcaaactaaatcggttattgattcaagtataatcaaacggttcgtagctcatgcacatgtcagtgttgaccgacgaactaaacatgtgtggtgatagaactggatggcacctggtgagaatctatttactctaggccttctgtatttactctgaacaactgaccaggcgtttaatagacattattggtaatacagcacggaattctccaccgaaatctatcacacatcacatgcatttcttaatatactggggacgccgctgacgcacgcagttgtagcgccccagaacggctgccggtgctggcggccagctggcagaaaagggggagttgtatccggtaccaagaaggaaaagtcatctctatcgtgaatagtatcactctggcaaactccgccacatcctcgacatacatggccgctttcggtcagcttttgaggggaagtttctcttctagaacaatcgcaagtacctatagaacgccagtcacctatacggagtaatccatgccgaaatcgatactcaatcggcatctcacattgccggatctccacttagatatatttacgaagcttatgtccaacctcggtcttataaatcggataccaccacttctagaacaagtcgagcgagcttttagttctcactcctagggttcaacgtctatcctttccacgccgttagtcccaccgctaagagaagagtcttaggaagcgaactgtctcctctatatcagagagtcaggacgaacattccacagggccgccctttatgccattatagaacctagaacaatcagcgaacctagtaatggaagcgggatgttacaatgatgtctcacctatcctaaattcttacgtctcatatatctcttgagttttcgggctagcgtttctatcagagcgggggggtatatattacccaacgccactatgtctaacagcaacgtatgactttgaagtaatcttgcttcactagttacatttcatcggttcattatacatgctggtccttcgtagtagccatcgccatctactgactggggcatataatcaacaacgtcccaccgacctagtgctggtctataatcaaatgaccgaaattgacaggaagttccccgccctcactcgatggccttgcagcatagacaccaacccataggtcctttatattttcctcttcaaaaacccaagtgacctcccggataggagacttttccaagccctcaacagaatagatccacagacttccatcctcttttttaactagttcaagagttgccgtaccactacccatggccccgggcactggaagcaagctccagtccgcccaattgtctttcgcaacgacgctaaggtggggtttaccgtgggtgaattcaataccgcacttcacccacttctgccccccatcggcgctatttaggacaaggaccacaccgccctggtcatatttcttctcccaaacggcattgacagcgacgcggatccgcttgaatgacatgagaggtatagatttgtataagataggggccgagaaggagatggtggaaggcggtttagcccatatatccgtggaagatggtgctttgatagtaaattctaggggaggagaaccgttgcctggaacttcggcgtccgagttggcgaatttgaattgggattgcgacatggtgggccgtggaatgcgacgaagcagttgtataatcaaccactgatatttgaacaatggtacaagtgaaagattgaagatttgaggaagtcagcacagagagtcagcggaaagataaatgactttgtcctggtgcgagcagaagagacacgatgggaagggctcgaactggcctgggggatgaggtatatcttgtataaggtctcacatcagcctgagaactattaggaagactgttatccaaccaatgatgtttaaacctatctctttcactgcgtttaacaacaaaataaatgaataaattagtttaccatagatggatgatgcttttggtgcgcatcgcgtatcaaccagactccgaatcctaatagataagccgcctgagatctcaattttcataggccctaaggttccacgagcccaccttccatattaggcaattccacattggtaatagttacaaggaggaccagaggcatacaccaaggcaagtgccgaaacattcaatttgggtaatttgatgagaacggaatacgagatgaaaaaagaaagcctattgtggaaagagggactccattttagaggcgtgctaggtgaaaaccaattgttttaaatgcctttctgtcactacagtcactcttatagaaaagccatactggtttcaattcagagttagagcaactcggtcttcactgtcttcacaagaagcaattttaggacaaagaacattcgcaatgcctgagaaaactgtagtcgtcattgggtgagctttttccttgtccggaaatatttgagagagcacaaatctgacatatttgcaatattatagtgccggggtagctgggctcacaaccgcgctgctgctgtccaagtgcccaggctataaaatcattgtcgccgcaaagcacatgcccggagactacgacatcgagtacgcctcaccatgggctggagccaactacatgccgtaagtaggaataattggccacggacaagaccgtaattgacaagatttagtgtctcgattcgcgggacagaagctgcggaatgggagaaagcgacatgggcaccgctcgaagacctcgcgaggaaccatcctgaagcgggtgttcacttccaaggcaagttgaaggcttgattttagtcagttagcagtggcatcgactaatttgattaaagaatgtgagattcatcgtcgcgaaaaagatgccggctcggcaacggcggattggtttgctgagctcctatctccagagccttggttcaaagacactgtgccagatgtaaggaaacacttcttcacctaatatcatgttttcatatttaccagtttgattatttagttccgtccgcttccaaagtcatcgctcggccccggtgtcgatgcaggaacggtcttcacgtcggtctgcataaacacggcgatatatctaccatggctcgtgtcccagtgtcttaagaatggtgttactttcaagcgcgctgtgtttagtcacattttggaagccgcggggccgagcgtctgccccgggaaggtcgatttcgtcgtcaactgcactggtctcatggcatcgaagctcggcggcgtgaatgacaagactgtcattgcggctcgtggccagattgtggtggtacgcaacgaggctggaaagatggtcgatgtttcgggaaccgacgacggcgatggcgaggcatgctatgtgatgacaagggcggctggcggagggaccatcctaggcggttgctatcagaaaggaaactgggactcccaggtagatccaaacctcgctatcaggatcatgaagcgggctgtggagctgtgtcctgcgctcaccggcggccggggaatcgagcacctggacattgtccgacatggcgttgggctacgaccagtgagagaaggtggggtgaggattgaaagggagcgagtaggcgatctatggctggttcataactacggcgccggtggagccggataccaatcgtcgtacggatgcgcgcaagctgccataagactcatccaagacgccgcggggccacagtccagattgtaaaattagccagtaagaccaagcaagccactagttagagttagcatagctccactaatagctaagaaatcagtcgtctcgccacattagcgggggagttgattggaaacccccagttactatctttcttccttatcagtcacctccgtacaacatacgtcctctcgtgattatatgtttccttccttgtaaactaatttcaaccacacggcatgggtccatctgggaatcgcactaattctctcgcattcgccaagaacgattgccacacttgtgcggctcttaaagaaggctgcgaccgtcagcgccctcggtgcggcacatgtatatcaaacaggagagcatgcggcggctttgccatggatctcgtttggaaagagctgccagttgttaatcatgggccattgcccagaggccgcgaatctggatgcagctccaagagagatccgcagcacaccttcaagttcacgcaaggtcgcccgaaaagacggcggaaaccgaggcaatcgaatactgtttaccagtcaatattggatctgggtctagatgattccctacgccatgatggggcaaactttttgaatactactggcaaggccagcctatcatttccttcgacacctcaaccatcgagtcctgaggaactgggaatcagcaaagattgcagtagccaatccaatgagtatatgatctatcagctgcaaaatgagacgcatctgtctccaggttgggaaatgggattaggaactatggaatatgttgatggaaatccgattgatgcatcctgcccagacacgatagagcaggctcagcttcctacccaacttactctggacccagaccaagaaacttcgccgggcattattggcaatctaaatcaagcgggcggtgacctcgctgaagagctgtttcctatgacaaatcttgaaagtttatcgaattgggccacagaacaagataccgataatcccgtgctcgaggaagatatgcaacccatatatccaataaaatatcgcaacctagctcacaagtatgagccaattctcgctatatgtacgtatacacacttgcagattccttgcaacgtccttcccactaaatatttacagacgacgagaaattctgcgtcatgccgctcaccagggattgtcgtatcaaccccttcagagctcagactggaagtctcgaaaactacgactttcttctgcatgcgattgtagccctttctttccatcacctctcgaagatgaacaacaccgatgatttgatactcgaaatgcaccatcaccgatctactgctcttcatctcttcagccacgccttaagccagccgacttccctgccacttcttgataccctcctgatactcgtcagtatagaggtatattttgccctataatcatttgctggaatataatctgacatatcctcaaggtctgccagtccgcgttcggtgcgtggggagtacatctgaatggcgctcaaaaacttatcacggaacggaaggatatggaaagaggtttctgtgattctcgcatgcgtgcgcagctggcgatgctcatatggtatgtctagacgtcttgctcaccctgaccatcgttctctgttccgtctgacacctcggcaggtgggacacgacaattgcgctcatgtctcgaaccgagcctcgtttgccgttctccttgttggagagactgagagggttcgatgacagcgatggatggtcctgcttcggcctaaacgggtgtccgtttgaactgatctccatcatggcgcgccttgcaaagctggcatgcatatatcaaaggaccatccagatggaatggaccatttttaacttccgccccgtcagaaccataatcgctgaggtaaaagggtatgtcaacaaagagaaagtcgaatgggacgaattgaacgacctttccgaagacttcaatttgcgacgcaatcggtactactgcatcgaagcatggaggcatgccatattgctctacatctatcgtgtcttcacgaagaagcccgacgatcgagaactccgcatgattgattacttttctcgtgttatacttgactgcgtacggtgcatgccgtgctcagacaccacccagaagcaggttctcttacctgtgtttctagccgccgcagaagttggcgacgaaaacacccgttctatggttcgcgagtattgcaatcactggagagatgtatctcgaatatatcatttcgaaacggcgtcttctctgttggacagcatatggaaggactgggatccttcgacgagaagttcatactggtggggactcaaggttggcccgcaagattggatgacgggagatgttaaaggtcaatctttggtgtttgagttgctcttaggatgatcataggatttttagtgtatagctctttaacgacaagattctagtttctcattccaatttgatgtagcagaaatatctcctttttgtcacattcacagatagaaacatattcttaggctgatcgctacaatttccattatcttagcagatatacgaggattcttctcctcgttccttccaaattgtacttgacgtacaacaggaacattgcattggtgtgggcaatgacttgcctgaaacagagcgagagccgtcccggagtacgtcccggagatcggttcatgagcggaaatactataatccgctccaatataccgacagacttccctcccatgtctatcgtcttgaattgagtactctttccaaagacctagctcgcatcagacaaaaactgctcagagtatatcatatataaatcaagtgatttcgtgaagcttctctaggtttatatctgcatcatgacatgcaaaacatattggcggagagtaagacccaaatcaactattcaacttattgtggatcattggactatagagaggttataagtattttcgatctctaatgtacaatataggaaaacaagttggctgtgggtaaaacatgaaaatcatagtcagccaacagatcataagcacggatttagtccctttctagcttcacttcgcccttatatgccccgatatccttttctttcacgccatcattgtctaccaagataccttcgatagcttcttctctcctagcgttgagcataccgaagtcgacccttggtcctttgaaaatccccttcttggtggtatgccatagcacaatcacaaagcaaacaagtccagtacaaacgactgacacataactcatattctcgggggtcacaggtatctcagtggggaaacagtagatgatatcgaggaacaccacccacaagactgaaatcgcattgatagtagacccgtactggccgagatcaaaatagcgtgctggaaggacccgatagcggccgcgccatagcaaaacagcctgaggaaggacgcaggacgtttgaagaaacacgacggctgcgttgaccatagccgagaacgcagtggaggatccaaggaagatgagtccatatagctattgaagttgttaactgagagtgaacaaaaagggttgagaaatgtatcataccgaaacgaataccgcagataatagaagagcatggatgggaacttgcattccaggatgtacacgttgccaatacccagagtaaggcagcgctccatcacgggaaacggcccatattgtgcgtgatgccgtagtagctgcaaaaatatcgtcagacaaacttcaaataacttttcacaaccacataccattggccaccaagttactaaagaaaagaaaggcgaagaaagccatgagaatcgaagctgccactcgagagcccgttccgttgtagtagatgtcaaacaggggaaggccggtcacagtgtggagtactgcatcaatatcaggggttgcgtatagcagagccgcagcgaagggtaaagttgtaacaaagcctgctaggagcgggtagatcatgaccttgggcacattcttagacgggttaggaatctcctcgcacatgtgagcaccacaatcgctacccagataggcgaaaaccgagtttgccacggcgagcatgaaggcaaatccatcggaagaccagcccgtccggttcgtggtatcggtaaagattgcagagccagaggcgtggtccttcgtgacgacgaacaacacaatcgtcgtggaggtcagtgtcagcacggccaagacaaacatcagcttgttataaagaggaatccagtttgccatcaggatattgatcgccgccgccaaccagatcagacagacataaatcagatacgcgtgccattgctttgggtcatagtccggataccaggcgacggtaatatcgagaaccatggaggcgacgaaattggcgacagatccagaagagagccaccaaccgatgacactcatccagccgtttctgaacaaaaaaaaaagattagcaagatagattttaacaggcagttcgaggaggagatgcaattacacaaatgaagcgaagggtctatagtcttctcgtgcaaccataaaagaccagtagtactgggcacctgcaactgggtatgcagacgctagctcggccattccgattgaaactatcgttgtcatgaccccagcaattgggagagcccagatagtaccgcctgaagaagcctctgtcaaaccgataccaatcgctgaaccagtgcctagccacgtgcatgtcagggtaaaagacaaggctcctagagaccatttggagaaccggcgaggcatagcggcctcatagccagcggcctcgagctcgagatcatcaatgttcgtcatagttcagaagcgtccaaagaatgtagaaaaataactgatcgaaaggatattgtaaggaaagaagcttcgtttttaactcttagctacctgtgtagatagttatcagccgttaccgtggtgcttgatgtctcttcgcaagagggagataagagagcattctaggcatctgagaaatgcctctttccattcttagaaggagatattgtacttgatcctagatcaattccatactgtgatttgattatctttgccttcatgtcttatcgtggctgacaatacgaatgatcgaagggtgcccagaagcggaagtacccaattaggcaagcgggcttgtctgcgttcccgctcggctttgtggcgaatcccgaatctcggttctgcctcctgcggtcgaatcacatcccacgcagacgacccatcctattctgccgatttaggaaatcgaggcccgtcatgtcgtcggagataagcgctgtcgatcgccaggattagcaaaatggcttccccagaacaatattatactgctttaggaaggagaggagatcagcagttgggcctcggcatcagaaccccctcgcagccattaaagcctatttaaaggtgtacctgtgtgacggttgataacaccatcttctatcacaagctctcttcttcttttctcaactccgtgtggttgtcttttaccctctattctccaaaatgacttcgatgaatgaaatcttcggcgcctacgctgcacgaaaagctgtgcttgaagccagcagtaatccctttgccaagggtatcgcctgggttgaaggagagctcgttcctttccatcaggctcgcattcctatgatggaccagggatttctgcatggcgatctcacctatgacgtgccatcaatctgggatgggcgtttcttccgtctcgacgatcatatttctcggctggatgctagttgcggcaagatgcgaatgcagcttccgctgccaagggaggaaataaagcgcatccttggacaaatggccaccacgagcggaatcaaagacgcttttgtcgagctgatcgtcactcggggcctcgttggcgttcgtggctctacgcccgaacagctcacccagcagaatctctatatgttcgtcctgccatactcctgggttatggagccagagatgcaatatagaggtggtagcgccatcattgctcgcactgttcggaggacccccgttggctgtttcgacccaaccatcaagaatctgcaatggggcgacctgactcgcggaatgtttgaagcctcggaccgcggcgctacataccctttcctcaccgatggagatgcaaatctcacggaaggctctggattcaacatcgttctcatcaagaacggcgttctctacacacccgagcgtggagtcctcgagggcgtgacccgcaagagtgtcttcgatgcggcacgcgctaatggcattgagttccgtgtagaaatcgtgccggttgagtcgatatatcactgcgatgagcttttcatgtgcaccactgctggtggtattatgccaatcaccgtgctagatggaaagcctgtgaacaatggccaggttggtcccatcaccaagtgcatctgggatcattactgggcgatgcattatgattcgacctacagctatgctcttaactacgataactccgagaagccatcagacgctgggcgccagcagagactttaaatcaagccttgcaattggtcaaatgtacttaggaaaatcagttagcctatatgaaacttgtgcggctgcatccttatcttgttacaagagtagtagtaaatctcttttctcgtctaaccattgtgtcaacgctcttccaaataggcacgtattgtctaaatctccgagtctcgcgtcgaccttgaacgtccacatactgctcttcaaaaacatcgtaggaatctggaaatctagtaatatgttaccacggccgacctgaaattcacagacagcgcgaatagtgaggtacgctatatcattgaaggacgtagtttttgacggcaatataacggctttttcgtcgtcgcaactaccatccgagtagacgataaagctgctcacagagagggtcgcattgacgaagccctcgtcaatatatattcaacccaagccacaatctctgaaatagcgttgaactctcgcttatctactttgggacattgcaaatacgagcagcgagcaactagttaatcacatttttactactataaacaccctttaatcatcgtacaaaagtgactagattgcccaataaatccatctcacgaggaaggctgcccaatttagcaaagccgaatccttcaatcaaatctttctcccaaccacgacataaacatcgaagcaataatagcaacctaggcggtgcaagtcacttagcatagcctccctcagacttacaatctgatccatggattgtatttcattcaacttgtgcattttgaaagcagcagtcagaacatgctggattccgacaacgaccgtgagattgaggtcttcccgcgtggccgggttgtcaagagtgtagatccgctcttcacaggattccagtccagatttctggaaagtgccacgaagggtagcaatactaaagggagttagcctctctatttagtccctggtagtcaggcttactttggtgttttcccaagcgaaacaagagtcctaaggaataagtcggttccatatcgtgcatcagtggctcgcttcccctcgggctctcctttgattgcacactcatgtgcggcacaatctatccactgtaaataacctcctggctctgctcggtattacgttagatcttggattaatcgaagctaagatgggaaactccgtactgagaagcgtcatcaagtttcgcacggcaggctcccactcgtcagaagacaatgccaccaccatcactcgaacattgacgacatcgtattctcctagatactcatctgggaatggctcaagaaaattttgatgatggaaggtgatattttccggcaaggcatccttgtggggaaacatgacgtctgagaggtcaaacccgtcaagctgacaagtacttgggagggcagctgcgagctcacgtaaccagatccttggagaatagtgttagggctttcttctcttaatggagttgttactcacccagttcctgtaccgacatctgcaatgcgcatacgatcatgttgtttgatggctggatgaaggagatacccaatattggcttgccaggctttatattgcatattcagtctgtattccatgttaatattaccagagggttgaattgctgctgagttttccacctgtcgcgttcggctatgttcctaaccagtaaatattcaccgtgagattggacttggtcggacatttccaaatgtcgaaagcgatatgatcttcaaaaggttgaatcagattaaatccgagcaaagttccagcagtataagctcttttataatggcgagatttagctttgaagggcggatttgggggcttggtggcggtagtaagcataaatgttagtcaggcctccgatccaggcctcccatctaggcctcccatttcggccccatgcaggattctattaagttatagacctcgaacggtctctgtctctgcaacagccaactagctgagagtatgttcagtcagcggtggtagatctcgtattttttggagtacttatatgacccatcaaaccaacggcacctctctagggcccgagcgattgagctgagtggttggggctataacttgaactcacatgtgcggaggtgatagacgtcatcctggtcatcaattgccattttcaccataaagttcacgactcggtgtgtattatcaattctagcgcccaatcgcgatgagggagcagcaatgcccaccccggaggtgtatggggtgcaccttactccactactaattactgtatgtcaatgtagcagggccttgggggttgatattattactactattgctgtgtgcctcaaatttatacccaagcataaaaagtggaggtctgtgaatagtcgcgccgcgaagccgaggcctatatgatcttctgatatcctgtaaatatcacaaaatgaggacttatatgcagttgtggtgactagtatcaatcattgactcgccctttcgattcgaaaataatcattgggcacttcccctcgattcgtctagacgctattgtgctcgttccagctttgtttgccccatcctctttgcctgtcttcttgtaaaaaactaaccttacggaatattattcaatgcattcaagacactttagtgtacttctcatctatctctttcgatcaagactccatacctaaccttggcgccgatcactccacctgactaagagccgatcttggcgcgccgaaatggatcaaagtcgcgtccctcaacaggacgccgaccgcgtggccaccatgtacggcgaactcggcaacaaattggtacgtgggctatagattcatcccgctcttgggcatttatcatctcaacacagaccgaccgtataatatcaaaacaagagaaaacgaaacccgctgaccaacaactcacgcgcaataggtccaacacgccaaacgcacccaatccctcgcccacctacccccataccaaaccgaaatcgtgcgcgcagtaacccgggaagtccgcgatctcgaccgcgatgtcatccgtctcctagcacccttcgagggcgcgttcaacccctcagccgacccagccatcgcctgcgcgctcctcgtcgaccacctgtgcatgcgccggaacaagcgctgcctgcttgcgtatcaccgcgtgcgcacagacaagctcgaggagctttgctggacgggcgtggatatcctcgagcagcagcagccgtccgatgacagcgcggcgccgcagcacacggctctcggggcgaacgggcatagctcgctgagtcccgaggaggaggagtatttccgccagtacggggatatgcttgctgcgtataagggccagtggacggatgttgatttgacggggacgctggagccgccgaagcatttgtttattgatgtgcgggtgttgaaggatgctggtgagattcagacggaatatgggtatgtttcttttcttttgtctcctgcattttctgggtgttcggtggctaatttgggtttagggtgatcaacttgaccaagaacagtcagctgtatgttcgtcaaggtgatgtggagcgtctgattgcgcagggtttcctggagcggttgacttgaatgtgagccggaactacctggctgcttcgggttttatatgagtacaagaattacatgagcaaaagaaatatgagttagcgttggatatctacagtggttttatgacgggaccatggactttgagatacccccgccgttaagacatcggccaaaatgaagattttctgcattgccatagtgcgagtctaattatgtatgaccgttggtttgatcaatagcttttttactcgaattactctctagggctagattggcctatggtaaaagaccaattgaagcgatgaccataactagttatctcgttggctggcgttatgcaaggaaacaaggctgcggctgcatgtcaatgccgatcatgcggcgcatagcactgtgttccgaccacggagctgtagcatgttgtatactatttctattacgtatgattatcgaaggtctagttagtctagagttagcgcaattgaagagacaacctattatatctctcgaagacccgttcccctccgctctcattaatacggtgaaatgctacggcgtactccgtagaaatacccattagtagtaccatttagcccacgatcgacccgaccgcacttcccctctatgcttaatagaatagatcaatctagtcgaccccactaatttaaacctctatcttagcctgtaatgcatggaactagtagtcattgtaggccgatgtactccgtgatagattaattaatcaagccttgcaacctagaaaactaggcacctcaaaaagtgggggtttgaattggtaacctggggtgtcaaccaaagggttgacattgtagtctttttagtagaacgttggtaggttcttcctgattgatctaaaagaaaatgggtaagtaagagaatggtgaaagagctatagcaactgagaggtaactgagagcaaactctctatcctaggccttaccctaatttagtcagtcccatcatttactctcactgacgagttctaatcctatacatcgcaccgtccttcttctctcactcaccatgccgaatgtcctcacttccatttctgtctcgacgggctcatccatgagtacaacttcagtgatacagtttgacaacctgtctgcctttaaagctcacgtcctctcctccctacaccaagtcgaaagctatcacgactttttatttaccgacgtgcctgaatcctgggggggcggccgtgttccagcgtattgacgaaaagatcccttctcggtaagtcaaagaccttctgcatctaattttccttgactcttacccaatatactaggaaaacccacaatacaagggaccgtactctacgggtcaaagtcataccgacagaggtacaaaattgtatccagcactggctagtgcagcagatgatcgactggctcttgaatcataacataacgcaatatgaacaaccactcttacgtgtggcagttggaacaagtaagtaccttacaactcacttacctgcacaggaactctagaaaagaacccaacttctttttccgagtcgaggttcatatcatgccagctattgcggtagagtgtggctggagcgagtcgattacacgactttataataatatgaacctgttactaatgggtggtgatggctctattagggttgtcattatcgtcaagtggagaaagctgcaaggaggtgtctcggggactgtcgagctctttaacagagaccgaaacgatatgcccagatgtgaacaaagcgaagtatgtccggatttctgattaaatatcacatacttattacctggaatctgtgcagactatcttcccccgccctgccactggaaataatcaacggctagggattcgacgacgtgatatctttgggccggcgctattagatgacaacagcgggaatgatatcctctacctggatgtcgagcgactgcgtggttatgccgccgaatcccttcacttcatgaaccttgttccggcataaatatcttcttggttgattgtatgcaactaattgattcctttgtcttgatacattgctgctactatgactactctctctatagtaactgtaaggcgatttactacaacaatacatgtagctactattgagagcataggtgaaacttgagagaccctaatatatcatgtgatgatatcttatcttatcttatccgcttaggtcagccgagtgttggctgtttgcgcacgggcctaccgcctcccactatcttcatctgtattagtccggatccggtttagcgcgcctattaagagataagggacgtttagtcaaaaaaccttggaactccgatacttcggatcttttctatctggtctgttgctaattcagatttgtgttgataggtaacttcctttcacttctatataattcactgagccccccttgcaatgttcatctcggttgcgtcatctgtttgtccaaacggcccaatgcgttaagtggccccgtttaacttccgaatcctaaattttcgacgcacttggttggacagcaattgcgcgagataccatggcggttttgcagcctcgtggccgtcgcgactctcgtgcatcagcgctatcacgcaatctgatgtttgaccgcgacatccagggtaacgccccatcagaaacgttggtggaacatgcaaatccaggtagcccgcccggtccaatgggagcggaatcatccagctacaatggatcaacgacaagaacaccaaaccgttcattttaccaccggtccttcaatagcaatatgggtgggtcattgtggtgcatacatagtgcacggctagagatacggcgcaatttttactgaccattcgacctatcacagatccggctcattatgcttcaggtggtctccgtgaccagactgcggaactcgctacctatggcctttcgctgaataagaattccctcttgagggacggctccggcttacctcccacccttgatatattccacggcagacgggattctgcaagttactcccaggacgaagctgcaaactctcaatccgcagcgggggaggcgttattggagccagggtatccctcagttgaccctgcttcggcttcaggcccttcggccttgacagagatgattcgccgtcctttgacggatacggaggaggaccaggccacacaacccgggaccgatgatatctccttccccccaccgatgatctatgcggaacccgaacgagacaatgaaagcacctcgttattatctaaatcacgatccaaatctatacaaaactatggaagtgcaagtgacgctgagaatcaaagggcggctgcacaacgatctccaaacttaataacgaaaggaatttcatccgtcacccattatactcggatcttgtcgaacccaaaggcatgggatgggcgagccatatggaaagatgctgtggtataccccgcaagtctggttcctgccgtattactgggtctactgctcaacattcttgatgctttatcctatggaatgatcttgttccctctgggagaacccctgttcgctcacctgggaactgacggtatctcgatgttctatgtcagtaccattatatcccaagtggtattctcctgtggaggctcgatcttcaaaggaggaataggaagtgagatgattgaagtagtacccttcttccaccagatggctttcaccatcatgaattcagtcggcaaggacaacccgaaatcagtgattgcaacgaccattctagccttttcggtcagttcggttctcaccggcttggtgttcttcttaatgggtgtatgtgggctgggctcactcattggcttctttccccgtcatattctcatcgggtgcatcggtggtgtgggctactttcttctacagactggaatggaggtttcagcccggctccccgggtctctcgagtacaacctccccacgattcagaaacttttcactctcgatactttccctctttggatgatacccctcttccttgccattggacttcttgttctcaaacgatttgttcgctcgaacttccttgtcggcggatacttcattgccgttgctgcagtgttctacattgtcatcttaagcgctaggatttctatgggcgctctgcgccacaatggatgggtctttgctgccccgtcttcgaacaacccgtggtatcatttctattctctctatggtgagtcaattggttgtaattcttctggcattccatgctaattcattccagatctctcggcggtcaattggactgcctttggtgagacaattccggccatgttcgctttgacattctttggtgtgcttcatgtgcccatcaacgtacctgctctcggcatatccaccggcgaagacaatctcaacgttgacagagagctcatggcacatggcgtgacgaatgcactttcaggattcgcaggaagcattcaggtatgtgaccccatcgctagagctgtggttaatgtgctaacggaagcagaactatcttgtttataccaacagtcttctcttcattgcaagtggcgggtcatctcggttggctggtctgatgttggccgcagccactgcagggattatggtcattggcccagtaataatcggctttattcctattatggtcgttggtgccttgatcttcttgttgggcattgagcttttgcaggaggcattggtggacacatggggaaaactcacccggcttgaatatctaaccgttgtcattatcgttgtcactatgggcgcttgggacttcgtggtcggaatcttcattgggatcattttggcctgtgtgaactttgtggtccaaacgtctcggaaatctgccattcgagcaacattctcgggtgaaatttccgggtcaacggtccgacgtcctcctatccaacaggagttcctacgcgaagctgggcagcagaccctgattatcaagcttggtggatatctcttttttggaaccatcgtgaatgtcgagaacaccatgcgtggcctgatcgaggaggaagctttcgaccgtcgtcccattcgattcatcattctcgattttactcgagtctacggaatcgacttctcggccgcagaagcattcacccgcatcaaccgcgttcttcaaaagcgcaacgtacaaacggccatatccggcttggatgtcgaaagtgacgtaggaaggtccctacaaaatgtaggacttttcgagccagaatctggcgtccctatcttcgaagacctgaactcagcccttgagttctgcgagaacaactacctgaaagtcttctacaaccgccagcaagcactttccacacccaccgattcaactgcaaactccgagctcctccaaatccccgcctcagtccccgtgccctcaggacccaaacctatcaccctaaccgacaacattgtcagctcaccccgccgccagcacctacagcgcgtggcgacctcaaccatccaagcccacgaaacaacaatgatggcctcccccgcctggtccgccatgcgccaaccactcccactcctcctccaaaccttccaaggcctctcaaccgaaaacgaagacttttggttccccgcctgcgcctacttctcctgcgaatgctaccccgccggcgcagtcctgtaccacgaaggcgacgccccgcgcgccttctacctcctcgagtctggcatgctgcgcgctggctacgacctcccacagggccgctacttcgagctcattgtcgctggtagaccgtgcggcgaactgcctttcttcagtgatacacgccgcacggcgacagtcaaggccgagcgcgattgtgtggcttggtgtttaacgggggcgcagtggaaggtgctacaggagaaagagccgcgcattgctcgtgaactgttgacggttagcttgaagttgacgactgagcgcatggatagtatcacctcgtatgttttgacgatggcggcttgattttctttttagttggcttgttcgttgtttgcatctagcttggtggttatctgagcgagttgttgggcctcgtttttaatgttgatattcccatattccccgactctttggtttacatatgcattcgtatatagcagctggagcatgcatgcatatcgacctcgtgatgtttttatgatcgttgtatgtagcagaacttcgccttgcacgcatgtgggtagttgtccttgtataattgaagatacctgattgattgcgacaagcagctgaaacttttctgaaaagccttgggcctattcaatgaatcgaaaaagataatgcaggagatgtatgagttctttgagtttttcacagatgatgtccgaaagaagaagggggggtcaagtatgagaaggcgtctagttctgtgatgcatcatgttaaatttctgtctttcggccgaaaatcagtctcttacaatataatttggggtgtttcctttgttaatgctattcttctttatttcttgctgtagatccaatatctcaattccatcccggcgcgctacggtgcacgtgatccggcgttcctgacacgcgtgggcgcgtccctgattgcctcattctagtttcacacttggatgtgactctcttggagatttttcaatcaacagcccagtctttaatcgcatattttatctacaaatttggctatggcagctgaaaatggagactcaaagctcttcgagcagtgttgcttctgtattgtatgctccaaggatctttcgaacgaatccgcagaacaggtacgtgttttcctgccactaggacagcctgaactagactgacaaaataaactcgtctagctagccactctaatcgagcaaaatggcggcgagcctctgattgtccaacccggtgccgaggtccccgatgtggccaagttcagccatatgatctctacaactattgacttccaagcatacggtactgcctgcgatgcgttgatcccagtggtgaagccacagtgggtgaataactcattgacgaagcggaaactggccaacccccgccaatacagcccagacccgcgtctgttcatgaacgatgtggtggttacctgcggcgacatacccgagggagacaaggatgcaatcatagggggtgtagttgcgaagggtggattgtattctccaagaatttctcaacaggttacacatttggtggacctcacggccgactccgacaaggcgcgcattttgcaggcgaagagattaaacgtgaagattgtactaccacactggtaagtttcatggtacaacagccagtgaccctcgctgactgagaataggtttgacgactgccttaaacttggtcgacgaatcgacgaacgtccatatacacttccagacccagagattttgcgcgcgggtcctgatactccaatccgatggcaagataataaggacttggtcggtgcgtcgacaacaaatccttctaagttgcctacgcctagttcggcgcatcaatcaggccaacgcagtgtctttgaaggaaaatccattatgttgtctccggatcttgcaatcggctcccacttgcaggagtcaatccaagccgtcctcgaacaaggcggtgccaaagtgacatcaaatattgatgtagcagacatgttaatttgtcgttaccgggaaggattttcatatcgcacggcatcgcgactgaacatcgacgttgggaatctcgcatggctctaccacctcatgaccttcaacacatatacttcacccctcagacgactactacactacccggtctctcgcactggaatccctggatttgagggtttgaaaatcagtttgtccaattatgttggcgaagcaagaatttacttggagaatttgatcgcagcagcaggtgcagaatgtaccaaaactttaaagcaagagaacacccatctgatcacggcacacggaatgagtgagaaatgcaatgccgcgaaggaatggggcctcgaagttgtcaaccacttgtggctggaggacagttatgcaaaatggaagctccagccggcatcaaacccgcgctacagccacttccctctgcgaaccaatctcggagaagtcgcaggccagacgccgctcgaccgccatgttttggagcaggtatttttctcgtccgaggagaatattgctcatagcccacggcgcgcaatgcagagcaagaaccaaaatatggtttcggtacagcctcccgctgagaagaaaaggaagattgatgaggatgccccggaaacttcgctcgggactccgcagggtaatgggaagtcacgccgacctattcaaacacccgcacgaactcgagtcatgtccgaaggcaaagaaaatgagacaccatcgtcgaccagtagccgcaagtcaaaagaggcggcagctgcccggcttcatgagtatgtcccggaccttgcgttgtacgaaaaggaaaggaaacgcgtggggggtgttatctacggtggcaggcgaaagtcagatgaaggccgggttcaggagaacaaaaagcgtgcctcacctgaagctgaggatgagagcgatggcgagcaagcagtggagactaaacgacagaaaaagtcacggccaccaattgctatgcacctcttgattactggatatcagagatgggttggtaagggaaacgagaagaaagaagatgcagacaaggttcgtttaacgactgaagttatgaaaatattggcttaggatctatctattgacactttcacagcgagggcttcgagatctcggtatcatggtggtccaagatgcccgacgatgcactcatttggccgcaccgtcgatcttgcgaactaccaaattcgttaatgcactcgcgtatgcgccgatgatccttagcacaaagttcattgacagttgcctaaaggaggagaaactgcttgacccttccgatttccctctagaggataaagaagccgagaagaagtacagttttgacctgtcttctgtcacaaaaaacgcaaagaagaacaagaataaaatgctgcaaggctatcgcatctactgcgtcgaggacattcgaggcggatttgatgccttcaaatctattgttgaaacaaacggaggagagtgcatgctttaccgtggccgtctggctataaagaaccattctcggcgggaggagagcgacgaggaaagcgaatcggaagatggaagccctgtccgcaaggatgtcttcctcctcagcagtactggagctaatcacgctcgagtctggcctcgattccgccaactggcggtcgatatcaagaagactccacggattgtccgggttgactggctcctggacatggccatgtcgcagcagacacgtgctgccgacgaatacgagctgaccgatgagatgatcgagacaatggaccagtagaccgataccaaggtattgagtcgacactctcatccacttagggctttcaacctaagaacatggattctgtgtataagtttggagtatcggcgacgtgattaacatgtcttttggcctgcacataggaagcgctttgtttatgtcacgaatagccacgatttatctcatagagaaatcccagcatctcatcttgagctgttcaaaagaacttgacaccctcctggccctcagcgccaaaaatctgcgccctgcccctcttaaccaggacattcagcgagcgcaacatgacatcagtatccatgccatggaactctgtagacgcgaatcagcacagtccgtagacattatcattcacaaccgaagacacaatctcaccctgcgacattgctccctccccatgaataagctcatacacggtcagaaccgaccccctctgcccagtgccctcaacccactcgaccaacacatccgcccactcctcaggcctcctccaccaaatccacgcaacagccttcggcccttgcccagcaccatttcccaacccccctaaagacgacgcgcctcctgcatccgagatccactccgctcgccgcccaccgccgccttcctcttcgctcttagtcatccagtcgatgaccgcgcgggcctcgcgcagatcaaggcgcttgcgcagggccgtattgtggaatagcggtgtttcgacggcgtcgattagggagagacggtattggcgatgatgccggcaccaggattggatcagagaggaccatttctcgagctgcgagtggcgggttgttgtgtttggttgcggggtgaagaagggggggaagttgtaggttggtgggaaggggaagggaggtgttgttgtcatattggaagggattaaagagtgaagattgaagagcagatagctaaatggaccaaatagaagtagaaaagttaagacgagtagaatgtcgagaacaagaagagacaagacggtcgagagactccaagctgtggagtaaaaggtggggcccgggggattttctcaatttcgacttcggcctttggatttctctcgactgtcccctctgctcttcacaatggccacccaaaatccgcctgcaaagcgcaccaagcgcgaagagtaccgtcgcaatgtacaggcccagcaggaatccaccgatggctccgtcatcaagatgccgcagaagaaattcttccgccagcgcgcgcatgcgaatccattctccgaccaccggctagaatagtatgtatcctatctgcctgtttcacgttaaactgctgctacggggtttcacgggattctcgagctccattggcgacaattccttcgcatccgatcgaagactgatagctaactcacaccctaatagtcccctcagccccgcgcacatggactggtcatcccatttccctgcatttgtcgatccggatacatccaaaacgaacctcagcggagggcggaagttgaccaaggaggtcgaagtcgtggatatcggatgtggattcggcgggctgatcgttggcctggcaccattgatgccagataccctgatggttggtaagtacagcgcagcgatattccaactcatatatacacccggccgaatgagcaccgcaaaactaaccacaaaaccacaggcatggaaatccgcacctcagtgctggaatacgtcacctctcgcatccacgccctgcgcagccaacaacaacgcctaaagaacaaagccgcgaacccatcatcaaccgaaccccaagacgcctcaacacaacccgaaaacaccgaatcagccccggccccaaccccagccaacgacgatgaaatcggcacggagaaaatcttcccaggaaacttcgaaaacatcgccgcaatccgcagcaacacaatgaagttcctcccaaacttcttcggccaccaccaactctccaagatcttcatctgcttcccggacccgcacttcaaggcccgtaagcacaaggcccgtattatctccgagtctctaaatgccgagtatgcatttgtcctgcggcctggcggtctgctgtacaccattaccgatgtcgaggagtatcaccactgggtcctgcggcatttcctgaataatgagcagcaggagggtgaaccggcccctgctccgagtagtaaggatctgtttgagcgggttcctgatgaggagcttgctcttgatccttgtgtgcgggttatgaaatttgagacagaggagtcgaagaaagttacgagaaataagggaaacaagtatgttgctgttttcaggcgcaaggctgatcctgagtggcctgtttgaaaaggagtggagggaactagatacctaattagagaggagagaggagaatatggcaagttaggaatcattggatataaatgatatgacgataagagggggaggtgttttggggcgtttttccctcattctaactgcatgcatggccaatatcatacttcaacatcgctcatcgctcatcgctggcaatcttcgcttgctaacaaaaacaaaacataagaacaaacacccgaaatgaacccgaaaaggggttgtagacgtgcagacaaatcaaaaatcaagttatgcaacaatcaaacaccgacatcatgcgataaaagcagtaatttcgctaaaacatggtggccgtagcccggcaactaaatggtgcaaaagtctagcacatcccaggcgccttgagacggataccctcacatctctcacagatagccagttggaccggaccaccgatgatgcggcccttagctgtccgcttgggctcgccttcacgaacgaagaatcggccctccgaaccgaaaccctcgccacactcgtgacaattgaagcagctctcgtgccactggccaccgattgcgctgacgacaacatcgtccatgacctgttttttgcagcccagacaacgtggtgcggtacggcgcgagtggcagttgagacaccacgcgaagccatctttctcgacaaagggagtttgggaatcgaagggctatatgagaagaaatagtcagttatcttgagggcgaacgtattagaagggaatccacacatacatcaccgcactctgcgcagaagaagtggccgacatgccattcggcaccacatgccactaccacttctccttcaataggggtcttgcagctcttgcaacggggactgaacatctcgtggaaatctagatggcagtagaaacgtggcacgcgagcttcaatgtcactagaatcggtttttgataatctctcggctctgttggattccggttctgaatagaaagccacgcattcgaggggtgtgctgcagtggaaacaggtaaagcactccgggtggaatcgacatccgccagcggtcacaatttttccggaaatggaaagcgtacaacgctcacagcttgcagtggggacaccagttcgtgtatagggcgagtaccaacggctctgcgattgcggttttttccccgtcgggtggggtctagccgcttgcttggaagaagcctcgatctcggagatagtgggtactttgatgtccgggatatttatcacgggaactggagtcggctcagagacttcaatggtcggtggtgctatttcaatcacgggtagggttggacgatcgggcttcggctgatcaactggtttccaagttttgtcgaagctcacgattgggcgtcccactcgatcactgacagctgaaggcattggtaacttttcgctgcggtcccctcgttttttgctggtagctgcgcggatctcgtcactgcgtctctctctcccatcctggatggagacaagctcatccttttcttcggggggaggagtcggagtagcacgctcgtttctagcgtagccggccttgtgtgactcagtgggagaaggagtagggctttcgtttcgagtgtagccagcaacttgtgactgagtgggagaaggagtagcgctttcgtttcgagtgtagccggcattacgcggcttggtgggagtgtccttgggggtttcaaaccgcgaaatcttatccatcatagggctgctgtgaactctattctgcaaccaaggcaatggcctaggaatacggcctagggcgttgcgcggtttgtttttcattgctgacgagtcagacttggaaaattccgacttcggttcgggttccttctttggttcgggtttcttctttgtctcaatgggctcttcgtatatttgttctttagggttcttgaggattcctttaaatgaatcgctgctgacagtttgcggttcgggagcaacagactcctcgagttcgggtagtttgaagttgactttgagattcttctttgagggaccagccagagatgatcgtttgcgcagtgactccgggctagagttaccatcagaagagatacttgagccagtggactggctgaatttattggtcaaggggtcatattctcgcgaaccatttttaacagggctctggctgcccttgttggcatcaggattttggtatggcgcataagggtttttgaaagcttgacccggattctggtgcatccaaactagctgcgtggcctcatcctgggccgcttggtgaagtccaacatcgtcctcgatatccattttctgcaaggcctctcgtagtgcccgtgcctcttccttttcgtgtcgtcgttgcccattttcacgataggacagagcgggagatgccggtattgatatggtacgtgcgtgaatttgtgctggaaagacgttcttccggatcgagtgcgttcgtggctcctgagctaaaggacgacccattgcgccggcggacgcttgggaattcgcccggcgatgggacattgcgctgcctgaccgtcgatcttcaacgtcatgctcgaccggggtacgcatggagaatgccgaggatgcccttggaggaaggttatcagactgatcgctaactgcggctgctttgcctgggtatggacgagatcctgtcggacgggcaggacgattcgctcgcaaatctttcaagtatgttgctgttgactcacatcagctccgagccgtccgacaccgaagagttacttacagacttgatcgttggacatgaaggatgggccaggaggtgagacttttctctgagtgggatgtttatgcatcatggaattgcaaggatcagggatccaggagaagatatatggataagtacagaaaagagggacctagatgaactaagatgagaagagtctagttggatctacaattgacggtctgagctggctagcgtcattgggctggtctcccctccaaacaaaccccttgggcccgtcgcgaggcaacggatgactcagcatgggtatctgccgataagggcttgtttttatgaagccctataagcccttttggacaacaagtgtggataatgccaatgcctggcactcgagacctttccctttccaggttgatgctcacctcttgccgctttttgatcactaagtaaaactgagctgaatattctgacttgatcacgagccactattgctaagcaaagcgaaccaataaatcatatccttgtgtgtacatgtcacgtgacccttctctaggtgaactatcatcggctaacttgggcagaaagacccaaccggcagaataaatatagactaggcctaatcgggctagacgatgatttctatttcatgtctgtcatctgtcgacgagtttcatctgcaacataattatctcactcaatgggatctatatcctaaacacggccagtatgccgtggaactacttgcggttatttactcggaaaatgttcgaatagggaggaggtgtgagaataatgacactagcgccagcgttaagtagaggcttattcctgatgaacgcggcatgtccttcctctactattccggatgtcgaattgggtgataatgggatgagacacatttggaacggatcgttgaggatctccgtggccacatagaaatgggccacagtccatctccaatcctgtcattccgggtgagctaggcaattaaacggatgacgataaggtacatttaaatatataaaagttaatactcagaatcttagccctatggatacatggctctattcaagctcatccattattgaaaccttgggatgtcatacttggctgtggagtatcttgtgccgagaagccggtgcggagagaatcgagttgggcagatgtgggggaatttttagtcacgagaattgcatagcttcggacgcgagtagctgtatattagcttccttcattggtctgatagagccgaatctaaataataaaccaggtccgtcctggggatctcgcctctatacgaaccatgttccaaggtaggattcggcattcagtccgatagtccgatgactccaattattttattaccaatgataaactgatcgaaatctagtccctttttctcttagcgtgctcatttaactcttttgcttccttttacaaaaatctctatgtcgtgacgaaaacggcaaccggtttcggtctttaaggagctcgtgatctcggaaaataacaagccgggcttgtatctgagctatcatcatggcggataatgtgcccatcgatatcatccgttcccatgaggacgaagtggaccgtgagagcgcagaacagaaagagacgttgtatccactgtcggcaccattggaagtcgacgaagatgaaaaatataagcacgatgtggccccggacggtggctatggctgggtctgtatcgcctgtgttttctggatcaatgcgcatacctggggtatcaatagcgtgagtcattagtcttcaccttcaaatttgcaccttcgtcttactaacaggtctaatatccagagctacggagtcttcctgagctattacctctcaaacgatgtattccccaacacatctgccctatcgtacgctttcacgggcggcttgagtatctcctgtgccctcctggtggccccagtagccacccatatgatccacaaattgggtgtacgatttgtcctcaacctgggcatcttcttcgaaaccctctctctaataggggcctcatttgcaacccagaaatggcatatcttcctcagccaaggcgtctgtttcggctggggaatgggcttcctcttcgtgggcagtgtcggcatcaccccgcaatggttcgacaagcaccgcggcgtagcgatgggcatcaacgccgccggatctggtctcggtggcctgatgtactccctcgccgtgggcgccattattccgcgctacgggctagcctgggcgttccgcattttgggtatcatttcgtgcgtcgtgaatctggtctgttgtaacttgctccgggaccgcaacaaggctgtcggcagtagatttacggctttccatctgcccctcctgcgtcgcccggagtttttgctcttcctcgggtggggggtgttcagtatgctcggatatgtggcgctgctgttcagcgttgccaactttgctctctctgtcggtctctcgtcacaccaggggagtattgtctcggcgctgctcaacctgggtcagggtctcggtcgtccgtttgttggcatgttcagtgacagacttggccgtattaatattgccactttcctcactttcctctgcggtctgttctgtctcgtcatctggacttctgctgacagtatgggtgtcgtatgcttcttcgccgttttggttggcactgtcgcaggcacgtattgggctactgtttctcctgtcctggcggagattattggtatcagggatctcccttctggcttaagcattacctggctcacgcttgttgttccttgcactgtctccgagcctatcgcccttcagctccgcagccatggtattggtggcgagacttcatatctccacgttcagatatttactggattcatgtatattggtgcttccatgtgtctgtgggttgtccgcggttggaaggtcggcgagctggagcgtgctctggcaagccgtgattccgtcgtccagtctggcccattgactggagtcaacggcggaaatgagaagcaaaactgccctgcgactatttccccggccttggaggccactgacacaaacattccgttatgggccccggtcagcttggtacgcagaatgatctcgttgaaaaaggtttaaataactgcgtagcgcagagtacatacatgtcacacaaatgaacatacaaaaatagacaatcgtctgtcattcatttgatttgaacgccgttttaatactaacctacatggatgtagcttttgtttcatgcctccgtaaccaagatccggacccttctcttgccggcgccacgaccttcttccttgacggagctgacattgacacgaaccttttggaaaagttcaacagtcacactgcgttccttctccgggtgacccttctcctccacacaaagggtatattcctcgctgtcaaactccgtagtgcggtgaggagctagctcccgtctctctgcgacagaacgagctccagattcaccgggtaggacgaagtcctccagacgaacgacaccttcaatgccgaagcggggaacaaagatgacaacaccgttctcgaacacacgcatcacgtatccttcttcttcaatacccgcatcaacaccgtcggcggccatcttctctccacgggccttgagagcctggcccacgtagtattcaatactagcgcggccagcatgctgtgcattgcggtgacggacgttgatgttccggcagatgtcttctagcttgttgcgggtgctgacaccctcgatgactgcgtgtccatcctcaccttcatacccaatggcagaagccaattgccggtgaaccatcagatcggcatatcgtcgaatgggtgaagtaaagtgggtgtaaatgggcgaggcgagaccgtagtgacggaattcggattcgccaaaggcccccgcgcagaaatactcggcagaggtcatgcaacgggtcgccaagatacggaccagggtgttgaagaatgggttcttaggatcgatgcaacgatccaaagaatcagccagagctcgtgagctggaaacatccagctccatgtctcgcttcttcgagagttgtttttgaaggtcctcgaaattttgaggcgggggagtggcgtgccgacgtagcaaggccgtctgaggaaaggactcatagaccttcgaggcaacagtgatattggcgagaagcatgaactcttcgaccaagctattagtgtcaagcatagccttggtcttgacgtccgtcaaaggatcgcccacttcatcgccttcactctcaatgcggacttctggggaagcgaggttcaaggcaccagcgtccatacgcttctgacggagaaccttggagaatttcaagagagtgcgcatgctttcggtcagctcgtcctgctgtgatttgtcgtcaatgcgtaactgagcttgttcgtaactgaatgcttcccgggagcgaatgaccgacttgctgaaatttgaagacactatctcggcatcaggtgtcatctcccactgaaccgagaacgcatatcgttcaacatagggcttgagagagcaaatatctgtaccaagaaggtgcgggagcatgtcgatacgcttatcgactaggtaaacagtggttccgcgaatactggcctcgagatccattgggttgttgggtttgacgaaatgtgacacatctgcaatgtggacaccaacctcaaagtttccatttggcagaagacgcgcgtgaagtgcgtcgtcaatatcctgacagccgggtggatcgatactgcaaataagcaagtctcgaagatctttccggccggtccagcctttatcctccttcgagacaggaaccttccaattatgaccttcagatggaaggcagtccaacacagatttcgggaacggcttatactgcacgtcgtattcaagcaataaagcctcggtttcggcacccttggtttcgagctctcccagagaccgaatgaagtgaccggtaggatatctcgaatcgcggtcccaagaatcgatggtgacaagaatacgctgaccgagaatatcgctagcctgtcttgtgcgtactctgatcttcgggatacgcttgtccatgggtagtaagaaaacgttttgttgccgtctaccagaggcctgtgagccagtagaattcgagtcaacgtgaccaacgtattgacgccagctgcgcttgataacaccaacaaccttggcagtaggctgtggcttgccatccgagttcttgccatgggcctttttgacttcttcctggagggctttgcgttctctgtccgttaccacagcatcggtctcctcagtatcagggttatcattacgggtcacggcttcctcatccacaatcttagtcgaagggctcttccactggtcctgtggtagtacttcgaccacgacagaatcacccgcaatagcgcggttactattatcacggcccaaaatgagaagaggtttatcgaaagccgcggtcttgacggaggcttccaggtagttgtaaggagaaacattgaacactccctggtgcaatgtcccggctcgcagaccagtcgtgagctttgacattgtgaaatattcagggtagaaaaactccccgcgggttgtctctttggcatctcgcgcatcctttgactcgctgatcatatccagcaacatttcggacccctctaagccggagacatagtcggatagcgacaaggccgccacattttcttccttgcatttccgaagattctctttgtcatcagttatgacaacaattgccggtatcgccttctctttcttccctttttttgctgattgttgcaggtgagaactgtaccaggttgctaccatgcgcacggcgcgatcgttcctgtcgttgattgtttcctccgggcctctgcgaacatgagtctctcggcgaaactcgttgaaaaagaggtagaagcgcttttcgtctgacttgacgagggccagaagacggttgtaaagtggtattgatcggtttctcaattcctcgaggacagtctggaggacaatcacatcgtaaaaggccccagtgtgctcaaaaagatccattccattaagcagcgcatttgtatcgggaacaatgtagtggcctcgggggaatgccgttgtgccggcggggcgatcagataggatgaacggcgcaactgtttcgattagcaacttgcttgaccattaccgtaataatttccttactttttccattggcatcagccggcgcaatcgtcgggcattgtgagcagagcttagaagagcaaggaatatcttctctcaaatagagctcgcggacaatcttttgcacctttccacttttcgtagacctaacgaagaccttgctggtaacatttgcggcctgcgggttggcagacaagtctcttcgtaaactcttcattgcgacggtaagattccactgtctagcagtggctgaatctgtcaaaacctgtgtgtcttgtgaaagatccgaggtgagagccttggcgagaagaaaggttatcgctgatcatcgcgataactagctgagtcagcacacgggctcgtcactttggggtcgaaagatgccatttgatcgctacaggaaaggtattttgtcatagagaacttggttttggattctactctagatctctttcagattctgaacttttatcactatggttttagcggtatgtgctgaccatccatcggacgtgagccacctagctaacaacttgctttgatttaggccgtggggcagctatgttcgactagcaacataacttcgaacctagctcaatgcaaggtgttggttcgaaaggctgctgcagcaggtgccaaggtgatattatactattccacagccaactttccgatagacagctcatatatgttaggtgctgtttcttccagaggcatcagactatatcgcatcctcggcagagcaatcctactccctcgcccagtctgaagagagagctagctttgtgtcgtccttacagaaagatgccgaggaacagaaaatccacatcaatgttggaattcatgaagtagcctctgaaaccaggctcaagaatttattgatttggatcgatgataagggaatcatctcccaaaagtaccagaaggtccatctttttgacgttgatatcaaagacggacctgtactcaaggagagcgcgtaagccttttttcagatccaatagttgacttatcaatcgctaaccttccatcaggagcgtccagcccggacaacaactccctaggccatttgatacacctgtagggcgtgttggtctgagcatttgttttgatgtaagtaatggacgttggaatcacatcggacattaacttcttactcatgctggatcatttagttgcgttttccagagatcagcctggcattgaggcggcagaatgctgaaatcatcacatatccatcggcattcactgttccgacaggaaaggctcattgggagcccttgctacgagcaagagctattgagacccagtcatatgtgattgcagctgcgcaggcaggcccccataatgagaagagacgaagctatggtcattctattatcatcaacccgtggggtgaggtggtggcaaacctgggggatgagtatcaggaaccacaaatcgcgaccgccgatattgatctcgatcttgtggcgaagattcggcgtgaaatgccattgcttcggagaactgatctatatccagaaatttgagagccctattgtgaacagcgaggaggcaaatgccagtggccctctttctccagtacatcctgcaaatagcctatcagatatcacttccatacagtttaacttaaatcattttcataatgtgcttagtgcgaattataaccatttttctttgcgaccggagcacctataagcaacatgacggaaagaaacttcgaaaagtgtaaagtgatacaacaaggaacgaacgaaaatagatgagcatgcagaaaaaacctgtctaagaacgagaccggaacatcatatctgccgtcgcaagtagtacagacataaatcgaaatagtccctctttgatctctatgtacaacgtacaacttggcgtttattccttgaccttatcagggtcctcgaggataccctcagcttccagtctccgacgagcctcttcgagagcccatgtttgtatactatcgcaattgtcagtattccagttgcgcgacgagtataaacgccaatattaaggcactaggtcgggatacaggttatacgtacgaagtatcaggcttgaaaacgtatgcaacaccggcgaccaaaatgcttccaatgaatccgtagtaccaaatgttctcccagccttccttcacgtacttctggccgggcttgacaccgaacagccacccggtgggaggatcatagtgatcaccgtgatccgcggcacggatactggatcgagttgagaatgcctgggtcttttgagactgacgaagcaggcaacgcgcccggaggatgtgcgacaatggtcgggcactcatcttgaagatgggatgaaggagggttgatgccgaaacactggcgtgcaaggagattggtgagagtcacgagggacagaatatccttgctaaattcaggtggtaaggacggtctcaattgatatgttgcctcttgcggtagagtggaggggggggcttcggcgggttgatgttgaagccgtaaaaggccgggaagctgtccagttatcgcgctagtctactttgggcagttttcttgtccgcctttatacctgttatttcaggcacaactacgctcctgccttggaaaataggtgtcatcactacacacgcgacgcgttcttatcacatctggccctcccatgctgcagggcgctggactcgccattcgtttcatctttctatatgcacgactcaagaacattcgaagtaactgaaccggtaaataccatcttttaactggtatgttttatctcagacccccaaaatatccccatttctgacaccgtcctactcagcctccagcttctacgcggaatgtatccttaccgattttgagcgcgtcattggatatttccgaatcgaagcaatggcaacaaacaatgcataccccatatcctcaaactcacgaacaaagttgagcgcttttcgcttccaggaaggcgaagtagttcccgacggcgccagctcgaaagacgagacgacatcagtcaatgggaacaaacaacatgaggatccgggctctaacagtgtgagggagccgatgcagacttcttctgataaaggatattctccgcctctcgaagctcaagcaccggaaccccaattacaagaatcaaagccgattaaagaatgccctcagactccgggaaacaagatacctctggcagatttgatcagcaatgctgaggattcgtttaatcctgccgaagtcccggaaatgacgccagttgatcaagtcatctggcagcatgtgcctgccagctcgaacccagacacctcgtcccagacaccagcgggtcgtcgtaggaagcgccggcacagctcttcgcctactggctctccctcgaaagggactaagaaaaaggtgcaaaaagaaccctttgatcttaattcaatacaagtcctattcaagacaccgcagcatgatatggccgctgaattgtggagtaactacatggataaaaacatggtcgatggcccggatgatcttccgccgccacggttcgcaaatcttctttcctcctcaccccaaacaccaggttcgagcagaacaagtcgagactcgtcagggctgagacgcgcgattagctgcaccaccgatttccccacctctcgaacaaaacggcgacgagtcaatgaactagatgtcagccgtggcatatttcaacgaactaacagcaatgtcgaatctgggagacccaagtcttccaggatcaactatcttatggagaaaattgaaagaagcatatacatggccactgccgatgcgggtccacctggatcgtcacccctacgccaacatgtggatacacggaggtgccgatcgtcttcacccacgaagaactggaggcttcacgaggccgacgaagaaaccactgaatccccatgtgctgtaccacctgggaaagtgagaactgggaaactgcccagtcttcaagagtcgtccgacgagttcggagacgatgatcttgatcaaggtcttctggacctggttaatgcctcggaggatcctttcattgagccggcacatgcatctaccgagtttgtgtctctggggtcttctgaatgggctggccttgacgcagaaaagtctcgttcatggcagcctgaagattcaatgctcaacagcaagcctctcatgacaataccccatagcactacgactaacgaaacaaaacgcgatgatatcgatgaattcgatgaatttgaatatgaatacgatgatctgcctgacaacttgcaggaaatacttgcaaaatgtgacacaaagcccgttccggtcaatctattgaattcaacgaccgctggaccatctttgcagggatcagatacaatgaataccccggtgaatggcagtatgcatagcaaacccccaaccgccatacctgtcaaacctgaggtggcatcatcggatgatgagtttgatgatgattttgatctggaagccattgagcaaactatgaagcaagcaggtgaaggtggactcgctcatgttcgtcactcttagtcagttaatttttagatatatgctaagacagtcaaaacaaatagaacctcaaaggtcgccaagctatcaaacgttaccgggtcgttgagatcacgaagagcacatatgttaccccgaaaggacgtactcagccagagcaggtcagatacattgcccttgcctaggatatagtcccgtccgctgactttgagtacagggcttgctagttgaagacgagaaaacccgagaccgcaagtctattatcttgcgagagtcatggttcgacactccctgcagcaaggattcgtatatccacctagtcggggacttcaacgtagccggccaatgcattgtggataatttgaaccacatgatcattcttcaccccgaccatctcatttcagctacggtcgtagcagactcggtagactgccagcgacgagctgtgcttcaagatcgagtcaaagtcattggcgcactcgagcgaccgcaagcctttggagtgtttttccacgaagtttttcaagaagctctcaaagcgaacaaatgggatatgaagtcattgaagacattggtcgaaaccgtcctgggcagacacatcgaagagctgtactcgattcaaatgagtatcccagaagctgttgaatatctcatgagcaggatgcctgctgttctagactgggcagatgctttcctgcatctcaagccacaggtacgtctcacggccgctggatgggcgaaagaggccaagaaaccttgctaaccaagatcaataggccaattctatggttgaagaccgcaataactctaagctgaacttgagtatcaacaaactgcttgaggtagaggagcacatctggtccccaatgtatggcctcaaaggcaatatcgatgcgacggtacaagtcacttgccgtgaagatgaaatggagaagaacctggtggttccgctggaactcaagactgggcgaagggatacaagccagtcacatagggcccaaacagctctctacactctcctcctgtcggatcgctatggtaagtaatgaggcctccgatcctattccgactaattgactaattgctaaaattatcgcagatatcgatgttacatttgggcttctctactacctcgagttaacgaaaacactcagcatccgtgcggttcgacacgaactgctccagatgatccaggtgcgcaatcacctctctggctatattcgtgagaggcagcagcttccaccgatgctgaaaaaagctcgtcaatgtattcgatgctatgccaagactccttgtctcatctatcacaagctctccgaggatggcgatggcgagaccagtgcacttggcgaggatttcgatgcagttgttggtcacctggacaacggtgatcgggacttctttcgcaaatgggatgaacttctgaccaaagaagaaggtaatctcgtgaagtttcggcgagaactttggacattgctgagtagcgagcgagaagccctgggtcgatgcttcggggatgtcgttatcgacccgcattctgcgtatgaggagaagactgggacaaggatcaatcgctaccattatacgttcgttaaaagacaagcgtctcctggtttctcctttgctgaatcccaaatatctgtcggtgaaccaattgtcatttcggatgagaagggccattttgctctcaccaatggatacgtgctgcatactagttcttcacacatcaaggttggcgtggaccggaaacttcgcaatgcacgatcaaagacgactggcttcgatgaagtcacaaatcagtctttcaggggaatcatggagattgggaaagaagagcctgctgccctgcagagcccagacgagcagctcgtttaccggatcgacaaagatgagtttagcaatggcatggccattgttcgaaataatctcatctgtatgatggataaagacttgttccaagcgaggcagcttcgacagctcattgttcaggggcaggcgcctgccttcaagacgatgtcgtcttcatactcgatctccgatcctggcaatctcaacgtagaccaaagacaagccattgacaaagtgatgagcgccaaagactatgctcttgtccttggaatgcctgggactggcaagaccacgaccattgctcatatcattagggcccttgtttctcaaggcaagagtgttcttcttacgtcttacacccacactgccgtcgacaacattctgctgaagattcgagacgacaacatccgtgtactgcgtataggtgcaaccgccaaaattcacccagatgttcaggaatttgccgatcttgccgcagtccaaaaatcaaccattgaagaacttaaggattcatacgaaaagccgcaggtcgttgccactacttgtctcggaatcaaccataacattttcaaccaacgcatttttgactattgtattgtcgacgaagcatcgcagatcacgctcccagtctgcctcggcccgattcgtatggcaaggactttcatcctggtgggtgatcactatcaattgccgccgcttgtgcagaataaagcggcccaggaaggaggacttgatatcagtctcttcaaactactatcggatgcacaaccaggttcggttgtcaacctagagcatcagtaccgcatgtgtgaggaaatcatgttactttcaaacactctgatttactcgggccgtctcaaatgcggcacgccgcaggtagcagcccgatctttggatatacccgacatcaacgcactagagaaattccatggcgaggacttgagtcatgctctgtcacagtcaacccgagaaatatgcccgggtgtccccagtagcccgtgttggctccgagacttactgacgccatctgcgaagacccgcctggtcaacaccgatcccatcggccccgcagccctcgagatagcacagggaaaccgtgtcgtgaatcacatggaggtcttcctttgctcgcaacttgtggagtcattcattgcctgtggtattcccgcgcgcgacattggtgtgatcactttctaccgcagtcaactctcgctcattcgccagagcctgcgacgctacggcccagatctggaaatgcacaccacagacaagttccaaggccgcgacaaagcggtcatcattttgagctgcgtccgcagtaacgccgaaaacaacgtcggcgagctactgcgcgactggcgccgtgtcaacgtcgccttcacccgcgcccagaccaagctcctcgttgtcggcagcagatccactctccgtgatggcaacgagctcctctgcaaatatgtgcgcctgatggaaagcaaaaattgggtttataacttgcccagcggagcgatagacaagcatttcttcccctcttgtaccacacaatcgcagctcatgtctccgggtgcggctttgactcctcgctctaccaagggcaaaggtaatggcaagaacaaattgcctccttcgcgttcttcccgtgaaccactgagcccattgggctcccgacaagcagcgcccggtctacgaaagccttccaagacaggtgcaaagttgttcaacggcacgaaggtggttgggaatcggcccatcttacgagacatagtgaatgacttgacgggctagcacacctagcatacaatgtttcaaacaaggcccttgtttctgttcttcaaatgcagatcgaggcgtcgcgttttatcatcacacgcgacttggcacgctgatacaaccattcgtcttacatatggttttttttcttttgggcttgggaaatacactaagcactgcagcctgttggttattagctgtcaaatgtagtcccattgtgaaactgtagttttcaaataagcaacagcagacgctcgacattcagcctctcaattaattgaatttacaatggaattgataaatgaaaaaatcgtattcatgtaggctacaatccatgtgtacctactgcggcaccttgatcaccgcccttctcatgggcaaacacctccttctcaacaccctccgttctttccttgaatcgctcgcaaatgttcacgcatgtgctagaagagcaccatctccgcgcaattctacttagtagaaactcgtgccttcttcgcctggggtccattcaggtaggtacggtcgccattggggctaacagtccaccgggcatggttgtttgggttggccacaaaattggtaggcacgatgttctccgcaaactcgaatgttctcttcttaggcgaagcggcagaaagggaagaaacagactgcatgtgctcctgggtaggggtgtaataaggtccctgcatttgttgggtgggtcgccgaacctgctgggccgctgaggcatggagttgctgggtttgccgcatggcagactgcacgcgcgccttaaaaggagtttggtacaaggtgggctgctgctgctgagccactgaatcttgaagtttctgggatagtcggatcacagacgccatgcgctccttggaaggggtgtgatggactgcttgcatatggtaggcgggctgctggacctgctgggcctctgtagcttggcgttgttgggtttgttgcatcaaagatcgcacgcgctcattgggaggggtgggataaactccctgcatttgatgggtgggctgaacctgctgagttgctgtagcttggtattgctgggtctgctgcatcgcagactgcatgcgctcattggtattgggaggggtatgataaattccctgcatgtggggggtggcctgctgaacctgtggacccgctgcggttgggaatggatgggtctgctgcatttgatgctgtcgctgagaccggtattcacggacttgcgctttgtgcttcatgaccttgtccagacacagctgaaactgctgttgatggagccgacgctgctgttggtagatcaggagctgctgttgatccccgggtggctgacgttcgaggtgagcttgctgttgctgaagttgatcccattcaacacgaagatatttctcttcattttgaagacgctcatggatttcaagctggttctgttgactgggatgggctgctgccactggcgtcatcaaggtagaaacaggggtcatcggggcagagaactgagtcattggtgtcatcggggcagacgcaattttctgagatggcgtgactgaggccaagattgtttttcccttcgccttgcgtggggtgctttgcacttttgtcttcttctgtttcttgtgtagctcgtcatcttgcttcctcttagggacccgcttggctgccttattgggtgactgcttaggattagggcccggtttgccttgtgaccaatcaaagaccttgaccgtttcagttgctgagctgggggtggcaggaggagctggagcaatattggcgatgtcgctgactgaatgggtcgcttggataaccggggcatcagtggcaggagtgacttgaacagtgggatcactgatgaccgaagcgcgctgggtgaatttagcagcgaattgcgtgactgcagcgactcgagcgacatgggcagcagtgataggagcggtagtaacaagagcagcggtgacaggagcaactttaacagccggatcaatgatggcttgagtatgttgagtgactggagcataagtggcgcaagcaggtcggatgaatgcaaggggaggacccaggtcggcgttttcgagagacaagagggtatccagcggatagactgtgctaggctgcttggtggaagtgctcagtttggtggaagtgctcagtttggcggaagtgctcagtttgggcacatcatcatcaacgacgatgggattacacaagccaccgtgaagctccaggtgatccagagtcgctgggccaaggacagggtcctcaccgagtgggacaaaggcatcttcgaaagtcgagccggacgtgttgtcctctccctcgaagtgatatcctaggaacacaagtcagttcagttcgactttcgtaaataaggagatgtacgtaccattagcacgagcgagttcccaaaggtcattggggaaacctgtctcgggaattttccattcttcgaggcccaggatacggccttcattagaaggcacaccgacggggctcgaattaggcttttgcgagtcttgatcgcaaggcacatcgacaaatgcgtcgaaaaatgattgggtaggatccataataggctccataacgaatgatagaataaaatgtgaatgtgaatgtgaatgagagtacaggtgatagagctgtcgagtcaaagaaggtgcagaaacacacaaaagacggatgaagtgtgttgattgctgagcgagtggaagactcgaagagcacaggctatgaaacagctaattgtatcttgtagtgaatgaatggtggtgggatgagaatgaaaatgcaatgagcatgggaaatgggaaggagagagaggaaagaagaagaaaagaggggggatggcagaagaggatcgtgggagtgtagcgatgtagcgatgtgctcatgtgctctcttcagggcaagataatgggtggttggagccctatgccccatggggaagttcaagtgtttgcaaagggcaagagttaggtcagggctcggtcactgatgctcccatcaactcccaacagaaagtcacccggccagttcccacggttccttcgtccttcacctgagacgtctggctagattcactagactgtgcactagactgtccactaggaagaaccataaccatgaatccgtcccttccttccacggcttctttacctagagtagcgacggcaagtgcaaaccagctggccttggtgttttgcctttccattagacaatgttagctcttgaccagcctttttttgtaaataatattcgtgactcacaacatattgaggaacagctgcatagtccaacgggaggatatcaaaccatgccattttaagctcatcaaatcagaggcctggccttcctctgcgtctggagccgcataccgactaaggtacggatcgacgtcatcttccccagacaaccgcggagaagccatctgaaccatggcaatccattcggatagggagccacaatattcctgcagatcatcttccgacatattctcgagtactttcccgttttcgtaaaagggcggagtgattatttgctcgtgggcaatttcctgtggctcgcaggttatcaactgtggttgaaccttgtcgatcggcttgtttcctgctccaacttttagtatattcttgctactatttccttttttggcttcggagacatgatcaccttcacccggaccagggttgctttccaggtcgtggaagagccaggccattgattgagtcagaacattggtgaatgcccatacaattctttcgaagcccttcttgccatgcagcatcgagggcagccgtaagttcaattctaccactgacgacattattagtaaatattcgaccagcccatttgctctgattgtacatacagaatctttcttttgcatgttttctgccgccgctgcggaaaggcttgccagtgagacctgttcgctcatatatctcctttcctagttcaattcgaagtacgcctatttccattcgagtcaactttcggtcctgcaacggagactcttccagccgcagcttcggggaaacgaaccgtctttgagtgtgaagacattatcggatcccgagcgtccttcggagatcatcaaaatattccctatgtcccaagtcagagtgccgtctttgatgaaatggtctctctgggcacaaaagctgtctgatgcttgtgcaaatgatggccactcaaatgtggaagagcctttatactggtctggcggagacataaatacctgacttgatgtatgtgttgaagaattcatgctcaagcagagccgaaggagtcatgaagactcgtgcatatcgaggtttttccagtttggtctcgagcgacggcttgatctgtgagtagaactcctttggcaggataacctcgacctatgaccaacaatcagtcaaatgacccttaatctctcaaaaaagccatagaccacctactgagtgtacaaatgcatgattttgaatcgttgaaaagggcgatctcttgcttgggacctgctttgggttgatgaacgccggcagctgagtgatggttgtgaagcacttttcgcgacgagacgattcgtctacttcttgaaacatgttgtctctgatagttttcgaagtgatgctcaacgttgacaatcgacgctctcgagttttgaagaatcaaatttccagccgaagggtgaggttcgattaagctcgggcttatcggacccataaggctgcagctatcaaaccttccacattcaaatggaatttgggatattctatcaacttctaggtagccattgtaggaatattatacagaaaccagatgtattggccttgaatggcatgtatgaattcaagatcaaggttatcaataaatattagtagtctcaatttcgtaacgagtataatggctcaatgtagctttgctcttatgtcacttgtaaaggtaatctgaaattaggtagagctcagtctaaatacttctgaatagaagttcactccaatggctcttattatgtggtcattgtgtacatatatgcatgtattcatatagagcaaacaacatacacgtcaattagaatggataatgcatctaaacaataccaataacatacaacgtacgcctctacaaagaaacagaaaatgtaattaattcaaaaacaatcataattcaccaattgtaacctaagaaatcatattgtctatggcatatttcctggtggtgtgccaaaacgcattttttccgggaaactgcaaggcgtagctaattacaaagctcactcacttcttactatttactttatgtaattcccattttttctagtgacccaatcgcaacttggacgcaaaatccaattccaatccaatacattatacggcacagggagcagttcacccaacttctgtaatttgtttttgaaacctcaccaataccaactttggtattaaccgaacatataaagctgttttctgatctctgtctccgaaagccgctccaagccgaaagaaccggtcgaatcatcgacaacggtcgcccgctcaacaaaccaatcggtcattttatacccatcactatcgaggatcataagctggataagaatgctgggacgtactactacccccgcagcggtcaaaatgtcatcatatccctgcatggcatgatatgtatcggcattataattgagttgtggccaaatctgaagtgaaaacggtctgtatattgcttccggtatcattggagatttccacaatgatatatgggagatcctcagaatcacagtctgtgacgtggggtgacagtctgagtcgtgcgtagaactggttgaacgcgtcccgcggtcaatttcggaagcattgacctgggataaaatataccttatgcatcgcaccaggttctgtttgtacgcaagaattccagagtttcatctgttgccgttctttctatgacgagattagtcgttgaatctttttcaaaagaccttttcgaggatagggaagtataccatgtcatgctcgaggctttgctgtatcatctgccggctcaccccctgaaaagcttaggagttagggataaagctaattgttctacaagaagaccttacctcaaaccacactggtcgatccataattcctcgagatcgggtaaggaatgatagacctgaccgtcgcacacatatatagatctcccattgggtggtctaaggagaaacctaagcttctcagttttatacatattaatcacaaactgaatattggaccattgcgacttgatgctctcgtccttgaggtatccctcaagtttcttgatgcgttcttctcctgagacctcataggggtgcgagatagcgggaagagctttgctaaggtcgaacttttcgatatgttccatcttgactagaaatcattaatggatgatttgggttgaaagaggagtttcccatacaatatatggagataacgggagaagttagcttctgggtttatttcttagtggaatgaatgtaggacggaaggacagcgaagcggcagttattaagtatttgacctcaggtatcatgggaccttggggacctcggggttcacctgggcatcaacgacaagggtattagggtcttgtccactatcacatcacatacatgagcttggcaagcgccaagtaatcactgataaggaccactggtggtgccgataaagattccccggcagtatcgggctacccaaaggcggtatccgagtactctccaattcggtccgtctatcgttcgaatagcattcagtctaaaccgctaggtcctatcggtcttatttctgctactgcttctgccgctggttcgaatgcaggtagacatccggtcttgcgccaattgctagaggagcaagacgaagagatggcgcccgcttcgcgtcgcgagctcctacacaaggatcactttgcattcgtttttggaagcgtgaagactcaaaactacttagatcctgtttccaaaggaccaggctctcacacgtgagtgtggcttttgcgcccggggctgtcgtttatttgctgacaacgatctggaaccacaggattcgcactcttgcttggaacccaacgggccagctgattgccactggctcagcagatcgcactctacgaatctggaaccctgaacgtcctaatgtacgatactccaccgaattgcgtggtcacacagctggtatcgagaaggctcttttcaacccagtccgcgacgcggagctagccagttgctcggccgatggtacggtgcgcttctgggatgtgcgctccaaaacatgtgtgagccgtctagatgtcggcggcgaagcatttacactctcctggtctgctgatggcagcacaatgatcgtcggcaagaaggtaaccatgctgcgctgcgactccgcagacttgatctctctagtggcacagtcactaacatatgatatgtaaacaggacgacaccttaatccccgtctccgttcaattcccctcttctcctaccacccatcctgatggcgcaaatgctcttaacctcccctcctctacacccggcgcaaccacatacacagctctcgaccctcaccctcaaaccgtccaaacaaatgcgacaaccttctcctggtgcatgccgacacctgaacgtccggggcagcaaatattcgtgacgactggcgaaggcaaggtcaagatcatgtcctacccttccttcgatatcatgcacactctcaacgcccacacctcggcctgcctttcaattgcgctcgcgccgacaggccgatacctcgcagtcggtgggagcgatgctctcatctccctctgggatacaaccgactggatctgtcgtcgcactttgtccagcgagaatggtggtgctattcgtggcgtgagctggagcttcgatggccgctacattgtaggcgcatgcgacgagcttggatgtggtgggaatggactggagatcttccacgcggagtctggtgatagtatttacacgattcctactgccggcatcaatgccggtgtctctgctgttgcgtggcatccatctcgctactggctagcttactcgactaccactgatggacctggtagctccagcgctggaggcttgaagattgtcggtgctgctggtggtggcttgtaatctcgagccttagattttgcttcctcttcttgggcaggcctttttttagccctaccctatcaaactatcatgaatggacgtatcgagaaagaaaaaaaagggacgagtgccaaattagatcaatagatttattgattgtagtgcttgtagtgattggctattaacatggattgacaggccgaaatactccaattaccaaccgtataagctatccaagagtgaagagctccgccccaaaaagaccgttcattcgttcgtcatcaaatcattcaaaagcagagctcaatggaagcttatcaggctgccacttcactcgaacattgtgggaagaagataattgcaaaggggttaggagttccgtaagtaaatcaggaaaagaagatactcggtccaagatatcgtgataagtgaccccaatatttgtggaactagggcgagggagagaaaacaagcaaaagagaagtacccaataggatgacgacctgcttcgagtcgcatgtgagaggattgataaaggcgtcgatgaattagtgagaggctaggatctcatattatgagcagattgagggactcaatgtcatccgttcagcggcaacacgagagatttcacttgttgcaacaatctcaagcgagatgagttatgacactggagactattgaaccatattccaacacgcgttgcgctcatgatggccgccagttctcccagccagcgttgatcggactttcaccctggatttgaccattcaagatttgagcccattgagattcactgaaagcctccatgtttaggttaccaaagccttcattgcccgtttctggatttgagggtggaaggtcccatgcagagggcatggagaagatccccgacgctcctgcaaccgacgggctattagagctgtttggataaaaccgaccagacatggaatccaaatcggtggctcgcggatttgtgtttccttgtggcatgatgtctgaattgaccttatcaaaggactgggctgactcctgactcggatatcccgagtttgtctttcgattcttgtttccgggcggtgggtcgtcagcgccattgattgaataggaagtgttggaagatgagttcaaggttgagggggtgggatggtctgatggtgggttgtttctgtcgctgaggttgccgaaatcagatcggaaatccatgtctgtatcgataatggcccctggtggtccggcttgatccgtcgcctgagtggaggttccgaaaaagtgacttgtgtcatcgccattaaagactggtcctgcagtgggctgtgtcgttgagtccctgttccggcttgggagcgacgtcgtcaaaccggcaggcataggctgattgccgccgcgattggtactgtattgtggaggcacctccttcgccatcccttgtgtttggcggaggttgtatatgggagtacattcgaccttatcgttgcagtatgattgctagagaagattggattagcttcgattggccatttggaaacaagcccgggaaacctactaccatggaatgtgcagcagacatgttggttctctgtctatcgtccaaagcacgaatgccagttccatcaaggtcaacatccaattgaacaagaaaggactcggtcagagggtttttgttcttcatcgcggtcagagcggagacaagaaattgtaacgaggaataaacactcgagtcatctggtcgggatttaagatactgcacaaaaacacgagcggcaatatagagacaaaatgacatgaaaggattcagctgcaaggcgttagtgcaaatgctttttaagtaagaaagctcaatagaaactcacgctcgtcagatcaacgtggctgatcatcttcatggtactcgaaatctggtttgcggcgacaaggcacctgcgcttgctctcggtcgtaatctgattcggcatcttgttcttttcggccttgaatattgccgcttggtgaagacatatagttgaagtatgaatgctcatgttggcgaaaatgacgttcacgtccgagacgccacttgggagtcgaagatgatcaggcaacgagagcgaaatgtgcaaaagaatattatcatggctcctgtggcgcttccaaaaatctccattgaggtcatgatcgttgtcttggggctgaggccgatggatatgtatgagattacgaccgaaaagacttgccagaaccaccacgcatgcaaaaggggctagtgtagatacaccctctccggcaatgatatcgttcagaggaagtgttcgttgtggcttgctcttggtaaaagagtcttcggatgcggggaggtttgtcataatctgattgtcgtcagcatacagctctgcgctataagagggttcacgagatactaacatcgttctcatcaataagaatgggccagccagttccaacgctcgaatatcgatccgtggcaaatgcgccccagaagactctcctacgttcttcgcgctctgtccaatctttcggtggtaaaatggattgtttgacgtcgagaccaacaccatcaagacgattcaatcccagcatcagtgcgagtcttgcggctttaccaacactcagccaggctcgtgggaagaagatcattcggaattcatatgtgccgataaataaccatgtttggcaatgtgctaaactgacgatgttctctccgaatcctttcatttcgtccgcctcggcatatttgcgtgcccgctggtagaaatgactatgtaggaagaagtatttgtcgctgacagatgcggcattgcaccacataatgtatcgcaagcagatcggtgggcgcatattaggggcaagattcagggctgcatagtaacgcgggcggtggataatgggcatcattggatagattttctcaaagaataaagcgtccctgcacggtaccaatgtattagtgaccacaagtagaaaggcgcatagaacacgtacagttcatcgatcacgtcctgtggaggaaggggctcctctagtcctagactgatcaagtcccattgagagttgtcaccctgggtaattggcggcggaggatacaaaatttgacttggctggcctgcgccgggggcaatagaagctgagaacgaattatccatgttgcctccaatgcctgccagccctcctaggtccgaaaggtcgggcaaatccagtatagattcatcggcgataggtgctgtgaatgcattctccaatggttgaggttgggaggttcgttgggtgggttccggatcctggactttgagaagagtctctacctgagctgataaagtcatgatcgtcagtgatatagctcacggtcaatacggcatttgcgaccattgtcccagcaagttcgtacctaaccgcgcttcaagctgcttaacatatccccgtttaggaccactcttcttccgcacttcatcgtaagaacattcatgtcccagacgtgagcaagtcccacagctcgggcgtctcccatcacaccttagtttcctcctccgacagacgacacatgcgatgcgcttggggcggggaacgaagttggtttctccggtgctagtgctttcggcagcggcgccactttcactagacatgaattccatttgagacgggccgaattctgtggagtattgcgacgattcgggtccaaaagtagacgccggaggtgccgccatagcgggcttgattgcagacttgtgatctcggaatatggtgcagtaggtgagtaattcgagtgaatgaattgatcttgaatagctccggtttgtccgggcgcggtgttattaggcagaagctaataggatagacctgaggcgtcaagagccaggaacatccaaatgttggccagatgtgccgaagtggggatgtgaaaaggaagttctatgaatgatggcgaagttcgtatcagcagaggctgagcgtccggcccaacctgtctttatgaggagctagatcaaagagcccctatagttcctttcgatcggattctaattagagccatgggaaagtcctgaattttcattctaatccccaacaagacccttgacaggtgcgatcagcggagtgccacgcaccagctacactgcctggaggcttggcacacatctagtgggatccggctaatcagagtagagatagagtatcttgtacggagtatgtgcacaccattatatatatctactatgtgcagagagaggaagcggtttctaaatctattttctttcgctttgaatgcatatggcctcgagccatcgtactgtacagtgcccattgcccgagtttcagtctgcgcaaaacaataacccccaagaaatagcgcgtggtagaagaaacgatgagacatttgatgtgtagaaaaaaacaggaaaagatatcgtacagtcatcctctgcgcggtagggatgaggtatagggtgaggaggtacaaatgggtcagagacaaagcagagtgaaatgcccagttcggcaaagcagcatcatctttagttgtatccacgacggcgctttccttggttgcgaggtctggcatgaacaacggccttgttgatcttccactttgggcgggtcttgtagccggatttggtctagaggtgaaaagtaagagtcagcccgatggaagttcagaagatacaaaacaaaaggatatacataccggaataccccaaggactcttcgggtcgacgttacccttagactttcctcgtccaccaccgtggggatggtccatggcgttcatggccagaccacgcaccgtcggacgaatgttaagccagcgtgagcgaccagcctttccgagctgggtgtattggtagttcgggttgctggtaataccaacggtagcgcagcagtccttgtggatgagccgagtctctccacttgagagacggacagtgatgtgctgggccagacgctcctgcttctgctggtcacgctgcgacaagggcttcttctcggcctcgggctcttcgttttgaatcgtttgctgacgcgagtcactacccttggccacaactgtagcatatgttccagcactccgacacaattgaccacccttcccgggtcgcaatcccaagttgaagatcaatgttcccactggaaccatgtgcaacggcagacaatttcctctccaggcggttctggccgcgagcacaccgggatcgacagtgctgcccatgctcttccacaagtcttcgggaattccggacatataactctggaccacgtcgccggcgcgcataccgtccgcggcgagaatgtagctcaacttgccggtctccttactagaagtcagggcgatatgcgctgtgcgcccgggatcatactcgatacgctccactgtgtgcggccccggagccatgcgcagaaaatcgatcgtccgaattcgacgcttggcaccacctccatgatggcggacagtgactcggccagagttgtttcgaccacccttggcgtggccacgcttgggaaacgttaatttgtgcacagggcggcctttccacaaatgatcattgacaggacgccgcaaatgtctcacaccgggggttcgcggagtgtaggtgcgcagctgaatgccagaagcatcacggccgggtggaggagcgaacgagacattcgggtcaataaaagagttcgtcggcgtttcgatagacttgggcttgatcttctcaatttcattcacgattgttgaatagcctcggattggcaaaggcagagaggagagacacctaaagggcagccgaatgccccgtagggcaattcggggttgaagcattgctgccaaaggattgggggggggggaggatggaagagacggggcttaagggaatcaattgaatgaaagtgtgattgatgaaagccaaaacgtcaatagagcagaccaacaaagactcaacagctcctctcctctgctttgtagatatgcacctaactctccacaggaacaaaaagttcgatggtcacgtgactctcttactgcaccgcctctcccactgccacaacgcgtaaaaggtggctgatgtcaggtcacggggcttccacggttcatcgttgtcaatctcaccgccctatgtccgattcgatacacgtgactcctttgttacgtgaggttcgatactatacgagaccgaaacggtcgttgtcgcagcaaccactttatttactcgttgccatactcacgcgtatctcccttcattgctggatctacttttctcgactatctcagcacatctttttcttgtttctattccgttcttcattgctcagctcaattcttcatcctagaaatttacaatagagaggtcttgaacgccaacccggtgatccacgcgactggctgagtggggcaacttgttttccacgctaagcacagtactagggccaaacatcgccttttgccctcaagctctcttccttttccctcatcattccagttaaagctacccttccatcttcccaccccccccccccactccaaactaacaaattatcgcgtgcggattcctgttgtacagtgtccccagatcaattctgtatcatttgccatctttttccccgaattcgcgcgccatttgatcttcggaaccagggttctgcgcggtcttgatacacatcaacatagtctcctttgagccgtaagcaccgactcatatcatctccacctgtctgaaagctctctctgcctactggcattgtagtctcttcagcacaactgcattttcactcttggtacgtgcacctcgtccttcatcctctggtatgaggtccccgccaaggtaatatcaaatggaatgctgacctgatttcccgagtaggacaagaaccattatatccctgtcccctttctcccttccctacgcgtcgttttccttttattttcctcaagatgcctcaggtgagcaatctttagcctgccaaaacacgtgtttgatatcctagtcgcgggatatctaatccatagcctcgagatctgggtgtatcctatgacctcactagaccgaccactaactccactacaggcccgcagccttcgtacgagaagcacgatgaatgaaaacgatgagaacggtccgtcagcacgtgtgacacgggccaaagcagccgccctcagcaccgatgcctctgccgctggagctaagaaaggcctgcagactaagcgagccacatccaccaccactaatggatcgcaacgtcctcgtgctgcactcggtgatgtcagcaacgtcaacaagaccgacggtgctgagatcaaaggtgggaagaagccggtcgctgccaaggttggtttgacttcaaaggcaactgtccagactggaggtgttcagaaactcagccgcaacaactcgtcacgaaccgcatcacgatctgccctccaaccccgcgactcgaacaagaaacctggtcccaacgcccataagcgtccgtcgcttaaggatacagccatctcggaagagcctccccgcaagaagaccgagcttgagcgaaagaagcccgaggccgaacggaagaagcctgagctcgagcgaaaggcccgaattatcgagaagattgtggaagaagaggaagtgaaggaggtggagatcagcgtgaaggatgctctgaacgaggccgtgcaagatctggacactgaggacttggatgacccattaatggccgctgaatacgtggttgaaatcttcgagtatctcagggaccttgagatcattactctgcccaaccctgattacatcgaccaccagcccgaccttgaatggaagatgcgtgggatccttgtcgactggcttatcgaagtgcacacccgtttccgtctgctccccgagaccctgttcctcgccgtcaacatcatcgatcgcttcctgtcggctgaagttgtcgcccttgatcgtcttcagctcgttggtgtcaccgccatgttcattgcttctaagtatgaggaggtgctttcccctcacgtcgccaacttcagccatgtcgccgatgagaccttctcggataaggaaatcctcgatgccgaacgtcacgtcctcgcaaccctcgagtacaacatgagcttccccaaccccatgaacttcctgcgacgcatctccaaggccgataactatgatatccaaacccgcactctgggcaaatacttgatggagatcagtctcctcgatcaccgtttcatgtgctacccgcagagtcacatctctgccgcagccatgtaccttgcacgtctcatcctcgagcgtggaccttgggtatgtttttttttttaaaaaaattcgttttgcctgtgccacacagcccaactaacttgtcataggatgccactctcgctcactatgctggatacaccgaagaggagatcgatcccgtcttccaattgatggttgattatctccaccgtcccgtctcccacgaagcctttttcaagaaatacgccagcaaaaagttcctcaagggtaaactactttgataatccccttgtcgcgagatcaaatattaaccgttttgcagcttctatcttgacccgccaatgggctaagaagtatcaccacctatacgttgacgtctccgaccatgtcacttacaaggtggaacagtaattgtaccacttacgatgtcatgctactcctgtctcggcaaagtcgattcctttcatgacttcctaaggctcttgcgacgacttgagcagggaaatcgaattcctacatatgttggcatttcattgtgctggtattcactaccttttgcatattcttacgacgacttgattaaatttctgcgctttccgcatttgtcttctgtggtggggtgttcggcgcttgtccctgtctgctattgttctcttattttacccacacatcaacctcggcttgcttgttttacatgcgtgagcattgtctcccgcctgtcttgatatcttttacattgtcgtcatcgtgttgcaggagtcgggatctatttttctccttcaaatctcagttttaccttgtctcgccctcattcaccctcgtcataggttggacggtgcagtgttatcccttttggatcctttttttgtttggcatgcaagttcccaaggcttgcacgtttgcgtggcattgcggattggaatattttgtggagccaaggtggctatggtttttgttttgtttctcaggtgtttctcaattcatcggctggaagattcaattggttgctagagctgagtcttctaggcatgcaaaattggtatcagatggacggtcgaggaggtaatcagtgacaacttgggccgcttttgttttcttcaaaatagttggatttctaacactggatccgtgtgtatggcatgcttattggaaccatttctctttttattctttcttgttggttttctgatagatctggggttggttgtagatgcgtgcaattaagctcacctgggcctgcttagccgaggctggtcccgaggtccttccaaggttagccccggggcacggtaagccgctgaattacctttgggaaccttactagttgcatccgtccttgaggctgatactggactggattgacaataataacccaacatcccgacggaataaatatatgattctatctcgtcatggattccaccgcacccccgccgtgcccattctgcaatatcgcctcatcatatcccccaacccccttcaatgaccctgagttcaacccagtctctactgccccggattcaggtccattgtcccacatcatcctctctactgagcatgtcctcgccttcttggacattatgccgcttacccgcggccatgtccttgtagcgccaaggaatcattacaagatgctaggagacatgggtgttcaagcagggcaggaggtacgtagttatttaccatctgcgcttattccaaaacgcttccttgactgatccatgtctttgatttcatacatagatggggaaatggctgcctatcctctccagggttgtaacgaaaactgtgtttggcgatgatccagatagacattggaatgttgtgcagaataatggtatgtcttgcccttgcttttctccatttcccgaaacccttgatctttaaattatcggatttgaatacggggtatttctacgttttatgctgttatgtatgttatgtaccaagattggcattcaaggaggttgaacgcccctgaccgatatcttaatattttttgtcgctaaaacagaacggcatcttctgatcacatgtctatggaagaaggaaaaaagcaatcatctaactgagtgacaggcgaaagagcagcacaggtagtaccccacgtccatttccatatcatcccgcgccctgctcaaggggtcaatcagagaacaagctttgctatgttcggccgtgggcagagagaggagctcgacgatgatgagggtgaggccttggctcgtgagatgagagttgaactggctgaggaagtcaaacgaattcaaagagacgagggtatagacttggctggaggcttggtttcagaggaaagcaagcgagggaagttataaagcacgctgtccctagtactctcttttgttcttgcatctatcattggtcccgtcttcgggttttcgctgtatatagctatttccatcgatcggtgttcggaagtccccgggctgaagcttcctgtctgatttactatgttgaggttcttattctgtctttttttgatcctgatcgacccgggtgccgtggcctcggagcatatgctagttcgacaagttagccgggtagtaagtcatcaactcccaaataatacgtaccactcgtcggaatgcattgaggtcatccgcagtagtaccctcgtcgtcaatctttttccgggccagtgtaacatccgacagttctccctcaggtagacggcggtacgttataagtcggcgagcccctgtaagatataaaatcagccgatgcctttcgacatggttgtagcacaaggctgtcacttacaagtgttgaaactctgaacagagatactgacgatctcgaggttctgatgcatgggaacagggaactcggttttctcatcatttgttgtgggcatccacattgacaaacgcccattgggaactaaggagcgaactgcgaagttgagaacgtcgttttgtagagcctcgaagccatacggccttttgggagcaatgaaaccaggtcggctacaggttaaagtcagtatttcaagtcggagaggagaagcaagaacacatacagataggcaggaatgccatcaatgatcacattgaccgcaggtttcccctttcgatttcccaaaacacgaagcccttcacgcacaccgtatggcggatcgcacacaataccatccagcacggcggttctcgtcagtggtgtattggtaagatcggaagtgaacgtatcaatgaacttgctcttgatcccatattgatcgaagttctcgtatacgcccagttttcctttctctttgccacggaagctgcgaccatcaatgtctgcacccaaagtcagagccccgaaatgcgaagcagcaactatgaagctcccagttccgacaaacggatcaaagaacaattttccaggcgccgcaagagccatgttcgccgtaatgagactcaactctgcatccatggaagtcgtgctgatataacgacgcttcttgaggtcgtatttgagcacgtcctcgcgacagctatcagcaatcttgcgactgagataaatcttccgcggatcttccgttcgcgaaacgcccagtttagaaacttcaacgtcgtcgatgtactcttccatcacaaaaaactcctcatcggggtcttttagccggatcgggcctttgaaccccatatatgagaaggatcgaatgatctctcccttctgaactaggctgcgcgttcctgcaaagtagtcaattgtgaatttgaatgggacagcaatgtagtcgttccagcgatgctgagttcgtcgacggacatctgcatgtagctcttcatagttggtgccttcgccccaaagctcgaagatgtccttgactagaatactgcgcttggcaactgcccgcgccgcggcttcatctggtagtctcacgacacagtatggtgactagggatatcagtcaaaattctgcaaattgaggatagtcatgaaaggatagagagaggaagggtgacatcgttgtggaccaatattcatggagtatggacaaatgacgatcccagtatcgatagaaagggtatcatacatattcattgtaggtgatgaattcgatgtcggcgccggcgagcgtggcacaggcttgaagttccggccgtcggaaggtctcatggagttgggcgaaccgaaccagataatccatggctagcgagacgaatatctgactgctttattcaaggatccctctttagtgggagtttatgtaactcgttgctgctttgaaggcggggtgttgcgggttgagatttttttttctcgggtcttcagaaatatactccacggcgacaaagtatgttcagagatagtatggtttgatatctccaacaaaatcaattatgttttgcaaatactacatttagcataaagagataattgctatcttggaatatgacttaaatgtttcaatcgaaaagggctgtacacaagagaatgaaatgattgattgaactacagtcgacgaaacccaggtctacccacgtatgatatcgcaccaaaaaaagaaaaagaaacagaatacataagatatatcaccacatctagctatgaacaaaaacccaaagatacgccctcccttaagatagaagcaagacatgcccaaaactccacccctatgcaccgactacctggaaaacatgtcgtgactcatatccctccaccgaggtaatatccaccttctcatcggctggtatcatatgatgttgcagatcccaaccggcccgacgagacagttctgatactaccacatcacagtcacccaagagatcaatatcgaactcggtatgtgacacaggctacacgccatgatcagtatgatacattgtcaatttcatcagcatgacttacagtgcgcgatatatagatctgcgggacgtggcgaggcagaatcccgggtacttcagcaacgggggctaccttcaacgaggtcccgatcacaatgactaggtctgctagctcccgatcttggtggattagtcgttcgccaaactcatcgggcaggtcctcgccaaaaaacgtgatatcaggctatacttttcgtaagtatggaggaaagcaaacaagggattcaatgatcactgaccttcatcactccaggagtcgggatttcatagtcgtcctcatctgaactgtcgccggagaccttgcggtctttctggtgaccattggaacttcgtttgcgcttaagaccttgcggctttagttctctctttgcaatgctctccttgcaggcggtgcagtgggggacatttcccgccctgatttcatcgaagatcgtgtcgccagggacattgaacccacacttcacgcaggtagccctcgcaaaggatccatgacattgtacaattttttccggaagtaccccggcatttgcttcaatgttatcgatattctgcgtgtagttagtcaacagcttccccttgtcttgtagaagccgaatgaacgcatgggtgggcgaccatttcttttccgttgggagaatatccttagcaatggaaaagaaaatattcggatcctccctgaagatatggatatcgaagacttcttgtggatcgctcaggcccaggtgcgccagttttgaatagagcccggtatccttcgaacggaaatcgggaatacccagacttgtggagatctgataaaatacccgttagcacttattgaggaatattcaatacactttgctttgtacgtacacctgcgcccgttagaacgacgatgttccgagactcgcgaaggagccgaacagcatcgtcgatggtgttgtactggggaagcttaggcctccgggagaactcgcgcgagatcgcgaccgccagaagagaatgataggactcatccggtgcaccgtcgaggaatgccggaggcatgattccaaacgctgtgcataactttttggccgtgacggtttcgcggaggatgctctcttctacgaacgccgccttgccaatcgcatgcagacgctgtcggtatgcagtcgcctcttccagagtacaggcaccgggaactgcgacagaaaaccgaccagattagccaatattcgttctgatctccgaagcgggggtgtccggggtaagaggtgagggtggatatagttacataccgaggccgtcgcggatctggtcatcgcgtaggaactggatcgcctcatcgcagttagacagagtatcccatgcatcggaatcatcactgtccgtctccaaatccgacggaatctcaagtgcgaggtccggcgcgtcgtcctccatgtcgtactgtttctccatatccacggcccccacttcgaccacagtggtctctagcgaagtctctccttttggggctggtatcaaatccattttgcaggagtttgagattccagccacggagacaaactcgtttcactcgcgcttgcaatctgctctggcaaaaattcgggcgtctgcctcaccggaggcaacttaatccggaaccgatgaatgaattgcagtggcgatgtcaaagaagttttggtttgtagttcagggggttcggcatgaaagagagaattggggggaaaatcaaagaaactacttttagtggtatcaaatcaaacagatcaatgaacatgtacatcatctcatgtggtcgtcacttttggtatctatgaatccgccatctcatcgtcagagtcaacttcgatctccacatccgaatcctcgccttctccctctccttcagcttcactctcatcatcctctccaatttctttgtttatttcctgtacaagctccaaggcatgatcgcggagccggtcatcctcatactgaaggacatcgtagagcttcaagctttgcttgagccattcacgactagcatctagtgatgcatgtcgcggggactcggcaagctcatcagcggtcgcatccttaggtgcctgttgtttttctgccagcaggaagagacaccagcctccgaggtaccaggcctctacactttcatcatcctctagaatcaagcgctcgaggacttccagagcctcaaactccatattcacttccatcaggagtcgcgcaagactgatgcgcaccgcaaaatcgggaattctgagatcttctggggccaggtccttccagaggctcatactgcgagtgagcgcggcttgcgcatcttcagtgcgcagttgtgagatccggatggacgcgagggtctgtagtacctctggcgcttcgggtgtgacaagaatcgcttccgtaataagtgcttcacaccgagcttcggcatcctcttcccagctaagcgaaaatgttagcgtcagcgcgcaatgaagtttggaatatatagaaactcacgaaagatcggtcatgtaggtttcggcgacagcgcagagtgcgttagacaacttagtcttcttctgtgtaatatcggcaatctgctctggtgactttttcccctcaagagactgaatagtctgtctgagggacgccacacccatctcgaaccacaggacgctgtcctttccaccttgttcactcaattgtgcaagccataggaacttctcagctcctccaccctgggattccggtatcgagccatttgggtcgagttgaacagcctgaaggaagcagtttctggcggtgtcgatgtcacctagttcaacattgatttctccaagaaggttaatagcggggagctgtgcagtggtgttctcagcggtcaactccagagcctgctgtgctaccacgagtgcctcatcagctcgaccagtttgtaggaggattgtggcttggtcgagtaacgttgagggatcttgagccatgttgccttttgagattgagccaccagggccgagaacggacttttcgcggggtttggatgatttcttcttttgtggtctggactttcccatggcaggatgcagtaaaatttaataaataatggtgatgtcgtcgactagaatattaagcagagtgattgtcaattataacccacagggtatctgggagaagtaaaaaaaaagtgtacctccaaatttttggagcggctgtttgacaggtttgcatgtgggaccgcaatattgtaccatatcgtaatgataagtccagcatgtctacttgctattattcccatcgtccctgcacttactatagctaaccttggaatggtctattcttctagctattacacagagaagaacatagatgcatgaagaaagatgtttaaatttttttctaaaaagacttctcacaaccgtggttgtcgacatggagcattgccaccattgtgcaatctcactctacatgtagagatcaatcgccttctttctttctgtctagagctaaaatgactcaagtcggtttctttctgcctccccgctatccagtgggcgagcatatcaccttctcggagcccaatcacaccgaatggaccatgtcgctaggatctcccagcaaaactcccagaatgacgagtccgacgttgaagctgggtatggacccttgtacgccgttgcgatcttccgtgtcagcagggacttagatggccaacaggcctatatgctcgtctacctacaagttccccatcaaggaaccgagttcttcccacctaatgagcgagctaagcaggccgctgctagaggccactgcgaagtcgaagctatcaaggccttccacaaacaatattcgactattacacctgctctccttggaataaaagaggatgtccaggaccaacaaggggttatcccggggggcttcgccatccactttgtcttccaacgtgtcccaggatatcgtctctgggaagatcatgttatgcctaaacatagagcccagcctcatagattctttacagatttcaccgttcccgagcgagatcagattagagaatcgtttaataaagggtatcgcgagctgaataagctgggatgggtgccctactatccctcggcaactaaattgatctgggaccccattgcctcgaaattgtgagtctttttcatcgtgagcctaggttaggcttgtggctgattattgaattaggtactttgttgactttagagatgttcactaggcaggttctcacgatgaggatgttgttcctgatggcaacgataccctagaaccgaaagagatggccccgattgtacgttgggggatttggggcctcaccattccccctgataagcggcaagaacgagcagatctttctaagtggacgctctagccctgaagtactttgctgcctatgcgacgatgtagctcttgagtctttacaattccaatctttttcatatgtatcggagataatcacaatattacctcctacatagccaagtgattgctgttttatagctatcttcggggtttcttttccatttcaatgttagtgagcgggtcatggtgttcttgaagctggaagtcggcgagtttaatatattcacgtgaccgggcttggccccgacgttggttgcgacttggtttgcgctccgatctcttttttcccgagtttcttaatattgcgatatctcaaggtcttgcctagatagttttccaagctgtcccgctggaactactcttgtccgtgtccgcgctgtttcccgaagaatctgcactcccgcgctcaaattgttaccccgccggcggatcaacagctatgggtcgtgaagaccagattgaggagcgtgaagtgctcgattcaatcttccccgatgaaattagcggtaagtaatagacgaggcgcctagacggtttaaactttctttttatccttgctcacagcgagacctggcacctagacatatccgaaacctcgtaccgagtatccataactcttgatgccctcgaatatgacggcgatgaaacagaacaacctgtgatatgcctggaggtctcttacccggaggaataccccgatgttggcccgaatctcagcatctcgtcaccacccaatgcttcgaagcatcctcggctagatgtccaggaagaccgggacctactgatggagtctcttcagcccactatcgaggagaacttgggtatgccgatgatatttacactagtcagcgcacttaaggaaagcgcagagcttcttatgtccgagcgagcagacgccattcaagccgagatggaccaagtcgctgcgaagagagaggaggaggagaacagaaaattcaatggcacagcagtcactgtcaagtcattcttggagtggagtgccaagttcaaaaaggagcaggaggaggaggagcttcgcgtacgcgaagaaaaggaatcggaagacaagaagaaaaagcccacgaaagaggagaaaaaactcacaggccgacaattgtgggagaggggcttggtaaagggcgactatgatgaggaaggtgatgatgctctaccggctgttgagaagctcagtgtggccgcatgagctgatacatagaaatgttaatgacctgccattacttcatgaaattatgtattataacctttttgaattggtgtgattatactgagcgatcagtgaactagtatcaagggcaggcggagtaatatacagatctgcaagtccacatggacttacgttatggtacagggaaagataatgcccaatcagcagacaaaagaggagtggaagagatatattgtcgtggtttgagctgcttgctatagcccatggttcccattgatcggatatgatcaagaaacctggctaggttggcatggataatgtaacattcctttacaacaaacctttgtattctgatctcgggcgacattgacaagggcatggccatggataggcgactctgatgtggtcaggaatggacctagaatggccatatggttgaccaacatccgtctgcccaaagagctatgggaatgtaatttgggatagcgcggcaagacggaccactcagtctcattactttggctgcttttggctagcttcttcttctgccaaagccctttcagctagaacaatcttccacaggttatctgcaagctctttagattgcatgtcgaagtgtccgattttcgcattgacatcggcaatggcatttgcaggatgttcagaccaagtggatggctccttagtgttggtgacgcgatcccactcctcttcgtcctcggcgaaaagtagctctactttcagtctgtcacgacgttcaatccagttccaacgacgtgtaagttttgttcgtatcacactgctaacgtttctcggttgcggttttttaaagcgcaagaacggaagtccgcgtgcattgacaagtacagggacattgcgcttcttgtcacctaatggctggggtctgtttaggaccgagccggcgttcggatgtcgctgatttgtttcctcctggaagcgaatagacttttcttttcgggctttcttgggcgtaagaggtttgacagatggcgctactagtcgaatcttcctttgcatcgcagcatatttatctttttgtgacctagcttgtgctataagagttgtgatccgctgtgcatcatgttggttggtatgggacgaagagaggagatctagagcctatcatatgaaatatcaacatgagctcaaccaagatgaatattcgatgaacatacctcatagcctgccttcaaggcatttgctgtttgtgatgggctttgtaattttttatattttcggaaattctgccgaaccagcggtttggtctcacccagccacggattgtctgcagttagaggtcgacattgtcggagaagtgctcgatagagtgccaaacctatcagagacagactgtcagctggaagtgcgggaaacgtagggaaatatctctcacaagcaaaacgatgagctccgttatacttgggcaccagcactttatgcattctgccgtgttgaaggttatactaataatgaagctaaagctaagtcttatctcatttctaccggccatcaccgcctgctgtaatgagctagcagaccagattaactaataggtactgcccaagacacataccgccttgaaccaaaggcacgtgaccaaaattgggtatatatacccgcccgcgcccccagaatctcttcttcttttctttcttcttcagctctctttgcctattggcttagatcaagtgtagtatctgttcttttcagtttaatctctgaaagtttccgtccaggaaacactttgattattcctatttttggatctcgcgacttggcccctgtgcttgcacatgcctcgttgcacagtgtcattgggcttacactacccccgatcgacgcgaacacctttttcatcaactgctcggcttgtccgggcgcttggagaagaagatcatgtagaggtaaatactattctcttgggcctaggacagtgtcccctcggagttgtttgtctggcgtcgccctgtctacccccatgttgtgccttttcatttttttggcatttggctcttggatcatcttatcctgcctccttcctgaagccccaggtttttttgacctctcttcgacctttagtctaagcgttcgtccccttgaatccctcgatccctttgtcctgtccccatgtttggtctaatgttccccgaccctaagttgcttcatgctagatagctaggaatcacgcatggaaataaaatgaatcatttctatgtcattccataaatgaagtaatagtagttagttattcatttttttatagttatcggtgcgcctgacgcaatgcccagtccagtttcacgaaaaaaacactttagagatgaagacctaatgtagggatgaaaattgaaagttggggcccaaaataacccctgccgatgctttcatgcagagactgtacacgctctagggtcatagaagaagagaagaagccaggaaatttaaatgaagcccaccgtcacatatgctggactagaaagtcgagccctccgggggctgcggcagcttcttatgctggggcaaggccatgtacctggactaagtgtcaacaccaactatcgcatcctctacaattctttgtgctcaccttcttaactcaatcagaaccgtctccatagtgttgtctcgtttccactgcgcaagggtaggaagctttgtcggatcgacctgtagtacaatcacttagtacataatggcttcgtgttttggtacccactctcctcataccttgccagagctgggatcaacacaggggatgttgactcgagaaacgaattgaacggtaggcgggttatcggggtagtcaggtccgcagtggatgttcacactgtatatccggttctcatggacgctctaaaagcggcagattagcgatagtttaatggtggaatggagaagacccagaaactaacgtgaggcggaccaaggatggttccattccagttgctcatcatcatatcctccccatcagcaagtccgtatgagcaggcatctaataataagaaagatacgtcagtgatctaagatcggacattatcggggatcgtaggacaatcgtacctgcactcagacccttctcgcccttctcgagctcctccagaaggcgaaagtttcttgggaccttggcggccatgttgaacaccgagtagtggtttcggaggctggaaatatcacgacaagtgtgaacagatgccaaagagggatgttgcgacaagaggggcaatgcgctgggcggtcaagtgggatcatgatcacgtgcgatatggcttatcggtggcttggcacctgttggagatgccacgccttgttgatcccatcgtggaatcgttgtactagcagaattgcagtcgttgttcccttgctgctcacatgaacttggaattaaagctcaaagtttgccactagtctggtgtaggaacaccgatctgttcatctgcaatcgagagctccctatactgttgacgtcgggagtgctggccatgctttgatgcaacaaacctatatcagaaatgtcctcccaattcttgcagacggagctcgccaatttgatacatgagtctcgaaggaaaaactccgatttgcgaaatgttggttatcactctctaggcgtcatcggccatggcacactaacgagaaactaacaggccgctgaacaatcattgaatgagctcaaagcactgccctcaacttcagaggctcagatagcagcaggtaattttctatatggcaaccatttgtcagttttcaaccgctaaaacggcattagatcttgttcgcaaaccgaatttcgtcgagccattcatcattgcatgctatactcggcatgcgaagcttgccggtattggtgtgatctgtttacagagactaattgcatctcggtcattaccctcgagccgtttgaaggatgttctcgggggcctgaaggagacaacgagcttgagtaaatgaccaaataaatcaaagcctctaaattgcgctaacgctttctaggtcttgatatccaactgaagattctacaatctctgccttcgcttttgcaattttattccaatgaattgagcggggagcttcttgcgaatacgttggaaatatgcgccacattacaggcaagcaaaacgattgcagtctctagtactgccgcggctactctccaacagctggtggtatcgacctttgaaagagtttcgagcgaagacagccttccgaaggatgtcaaaatcaccacaaccatcaaagtcgatggtcagtcgctcgacatcggctacttcgcctatgatgcactgcaagtattggatgatctctgtcgtctgattgatggtgagccactacagtttctgcgaacacgaaccctacccccgacctttgtactcgaacttatcgagagtattctcttgaacagcggccgtctttttgtgggacatcccgaactttcgcaagtgctgcgcgttcggttgttaccactagccgtccgttgtctatctgagaggtattcattcgctcaaaccgtccgagtcgctcgaattcttctcattcttctgaagcgtcatatgtctctcttgcccacagaatgtgagatggcattgagtctgataacccatctcgttgaaccggatgggacagcgccttggaagagactactctgcatggaaatcttccgagggctatactcggagccgggtactgtgcggctgatctacactttgtatgacagtgaggaaggcagaaagaacatccttcgtgaccacatggcggcacttgttcggctagcttcggagaagccttcgttgattggtgtcagtaatcaatcaacggtaccttcacgtgcagagcactcaagatcaaccacagaggatcagataactcttgaaactggcggtgttgctggtgtcattggatcaactgttcctccaagtgaaaccaaggtgcctggaattagcactcagtggagtgttgttcgtacgccatatatcgatctcctcgacaagacggaaccgcccacaccgccggacacttacatttacagcctggtccttaattgtatcagcagctttgctgaagggctcgcgaaattcattcttccattaacggtcccggatctcaagcaaagacgcaagaatcgacttatgagccccgttcagggacccgactccgctagatcttctcaagattttccagcagaacccatgcgagcgcagtctagctcgtcatcgaaaaaatcacatgttcccatcaatcctctggacctgcagtctcatgtacagtactccgccatcaagacttgcgcggggataatagagaactgttggcctgctgtcctagcagcttgttccacctttttgcgcgcatctttagatgacgagtattaccataatcttgttcgagcattccaaaagctagctcatgtggcgggtcttctgagattatccgttccccgagatgctttcttaacaactcttggaaaggctgctacgcctgtgagtggtgccaagtcacacaatgtgtctgccaccggctcccagcaaagtgacacaccccaaaagaaacggagaagtgcggatctgtcaagtctggccagttctttatcactggagcctactgcggtggaaggtcctcctgtgtctttaagtacgagaaacctactttgtatgcgggctttgcttaacctcggaattgctttggggccgacattggatcagccggcctggtctattatttttgaaacacttcaatatactggactggtgattggcatgtcctcaagtgcaatggtcaaatcggctagcggtaccggggagaccccagtcaccccaggaaacgatgttccaactgccaatcttgggactgaggtgattgcggttcaggcggcttctaacaaaatgctcgaaagcaccagcgatttcccaagtgcatcttttgaagaaatattacttgccttgttgaatctgtcagcattcaccgaacagtgtcgcaacatgaatgatgccccaggagtatcagacatacctcgaacaccgcaatcaccccaggcaggtggacgcttgcaccaaggttcccggcgcgtatcgcatactgtcggaaaatcaagaatgcaagacgaggaactcaaatttgtattggagaaagcaaatgaactagccaaggcaaatcttgggagactgtcttcgctcgagaaagatgacagcaaagcatgggggctactgacgcaaagtctcatctctacttccgcaaatactaccgtcagtccgaatcttcgcctgcaggcaagcgcgattttgaactcgatcgtattctcaacaatgaaacaaagggacgaagacgatgagaaagtctacaatcaagtgcagacgaggaatctgcagacattgaaagcccaggtcgcctcgctctatgcatcggacatgcacacgtccaagtctttgccaataaccgtcattgaaatccacgaacagaccttggaagtgttaaataatattctggaacagtatgcagaaactttcgtggacggatggaacctcatctttgatttaatatctggtgtttttcaacatgccccagatcctggacctggcgatcggccttctactctgatagagcgcagatcatcggctcttccagcaggcccccggttggtacgtgctgcctataagtctttgcatcttgtcgcatccgacttcctttctctgctaccagcgccctgtctcttaagcttggtgaatgccttctctagctttacgtcgcaaacccaagatttcaatatctccctcaccaccacctcgtttttctggaacgtttcggactttctccaggcccaaattgagcaaatctcagttgaccatgttgatgcgtctgtcagcgaagaagaactagctaaactagcacataaccaagacccttctgtttcccggaactcgctgtggctgctgctgctgcttcgcatcgttgatatcacgacagacagtcgacctgagattcgaaacagtgcagtccatacgcttctacgcatcttcgacgcctatgggcagcagctctcccccggggcgtggcgtctgtgcctaaacatggttctcttcaagatggctgagggaattgagacccctctcctccaagcgaagaacaaccgaagcagtacaaaacctgatgacttcaaggcgtgggtggatacaacagtggtgatgatcaagggtttatcaactctgatcaagaatttcttcgagacccttgtgcacgacgagaagttcgatcaatcctggaagcgacttttgaagtacctgcaaagtctgattgacttgcatattttggatttcagcgaagcaacattttctagcctctctgcgatcctcctccgggtgcagaatggatgtgaacttagcaacgatgctcttgagtgtgcgtggcttctatgggcaaatggccaccctgctagcgacgagaaggcgcttgacttagatcaacctaaccaggacgcggctttggcttatctacatacattccaacagatctatcgtctttacaaagatcagttgagtacgggacacattgaaaacgtccttcatcatctcagtttgctggtgtggaactcggtctccccgcgctactctccagatattgatcgaccctcggccttgcaagcgctagtcattgattgtatcaaaacgctctgcctggagaaagaggactcccagccgaatattctcttgtgtcttgccgaattatccgattcagcattatccaagtggagccccggcagcgacactcgaagaccaggattcgtggccttctcgaaacgcactatcgatcttgtcagctggtacattgccgaattcggcatcaagcaaaacgtcttcatgaatggtgctcttgcaaaatcactcgaacacctcagtactctaattgcggaaaagtacacatggcaagggaaggatcgcgagccgttcctatggcaaaaggccacaacagtatctctgaacgttctgcaagtcgctgtcccctacgtggaaaagcaatacacgaaggcaaacgagtccgaaacatctcagttctggcaacatattgttagcattacaaacggaattgtttccgcccgtggcttccaaacccaacaactccccaacgcccgaatcctcacagacgaagcattcgacatcaaagccttcacccgcctgaagaccctcatcctcccatccctcggcgcagcagcaatcccggacgccgtccgccgcgatttcgcccgcgctctcttcaactcctccttcatctacgctcccctccgcttcgacctacccaccggcctcgaagacgcacccctacaggacttctataccgtccgccccggccgcaccttcgacccaccgccgaccctgcgcccgggaatagcctatgtccttatagacacgctcttcgagctcgccgcacactcgcaagccgagaccgagacaaaagccgacgctccatccccgcagactctgctcgcccgctcgatctcgccctatctccttctgcgctgcgcggtctcgctcaagtcttacattgcagaccagcctttgcgtggcttgatgccccaacccacgcctgcccgcaaggccctgctccatctgctcatccgcatggtcgagctgaagagtgagccgtcggctatcccggatccgccttcgctgaagaccatctcgggtatctcgggtgaggatccggaggagcatcactatcggaagcatctcgagtggatttatccgttggttgtgcgcgctgtgcaggttgctggcaaggagcgcgatgatgggcagattctccaggcgctggggaaggtgttgcaggaaattggtcggtttgagtattagagctaatctggctgggtgtgtaccatgtaggcgattaatgcattgttttattttatactctagacttcacattctctcggaccaacacatcagaagtggtcacattctacaacctgaatctaagatgaggttcgatttggaatgaggcttggcacaagtgtaggcagagtaaggtatactacaaagtgatatcgtgacatagccgtgagacaggatcaacggacacaaaaggaatagtgagtagtagagtaaggaaaaatcgagatcagagacaagaggcgggtatagaagaacagatccgcaggtaccaagagactgtaagaaagaagcgagcgataatgagaatagaataggatagtctatgctgctggcgcgggaacaggctgaggctcctgccgaagcgacggggtgacttctctgccgggcccagcggtagcagagcccggtggaagagcgggctgctgacgctgttgctcgaggagcatctgctgttggatctgctgctgctgtgcgatctgggcgttcggggcgatctcgggagcttggcggtagagcgcgatctcggattgtttgaagtagcggcgggcgtctgttgttgggttagttttgagattggcattgaggtgtaggccaatggtgtgtcaggaatgggaggagcgtatggtaaattgtatcggtggggttgccaggaccagaagtggtttagcgtgggggtatcgggttttgaggggcaaatcggcaacaaaattgacgcaactcgggccgacttggatagttgtattgggtaacttcaattgccgacggctattgcattccgtctctacaccccgcattctgggatgcgtcatggactgatttgaggattgccaagaacgggggaaagaaggaagaaagaataggtaattagagcgtaccttcgtcgatcagtacgagactgagatagtaccttgtcgagtacttcttgttaacgtcgcggaatgtcggcgtcaagtcaaatccaccaaggaatagacggattggaatagtttcacctgtgaaaagttagtcatgctcaagattaccccaaacttcccaactctcgcgggaataataaagccgcagagtggtggccgtggccaggcccagatatttcaggggtgttcactaacctctcgatggagagccgtccataatctgcgctcatgttagcattcttatggctcgtatttcatagccgatatcacttcgagtacgttcaacaaatcacatacctcaaagcgcaccaatgtctcactctcattatattggtttggcggggatccagttgtctctcgccgaatgatagacaattccatatgcttgatcttgagccgcacgagcaagaaatagatacggccgacaatcacatccttgagatgatacttggatttggagtattcgaattcgatatgcaggcagtcctcaataccgacgtccatcttgatagggctgttgttctcaggtggcatgcggtacgagtacacccacaagtccttctcccgaatgacgtccgccatgcgccgtgagacagtcacccggacaaagtagcgcagcttaacgttgatgccattgtaggactcgtattgcttttcgacgttcttgaaattgaaggggaaggtctgcgggtggaggagctcgccgggcgcagcgagttcttggaccagggaaaggaattcatagtggttgcctcggtcgtagaacatctctgtattccaaatggaaaggtgttagcgttcagcctgcgatggcgaattcaggagaggctggtaggttcgacgcaccaatcgtgccaataaattggaccttgatccccgtgtgttccagtcgcttgccatccttcggtctgatagtcacggcacccttgacggactcgccgtccatgtacagagggacccgctcgcggcggcctttgtcgagcttgacatcgacggtctggcgctcatcgagatcttcgaggaccacatcgatgtcgaccggggtggagaagaagagtgaagccatggtggaggtaattgaggctgcagctatcgaggcccgaaccaataagtcggagctttgatgatctggagcttgtcgcggtggcctggaggtagcttacgtaataccgcctccccgcgccgcccccatgaactgatattcgacatgtttttgtatagaactggtgattggagtataagatctgaatgaatacctatatacgatatttgatactcttttaatctcgagctccacttgatctccccgggtctacttctggacctgactaccaaaggttataccactgatctacaactgtccgttgtaacttggactcttcaggcatgtcggatccactggcctcccaacattcccatttcccattcccaccgattggacctgaagcggtcttcgctgtcttttgaacatccaagcacacaacttagccatacggatcagaacagcacaccttctaagccacgtcgaataagcaggagatcggatatgtcggaatccgcttcccgtcagtcagcttgctctcatgaccatagacaaaacaatcggaaaatcagtgaatagccaagcaaggatccgactcgttgaccccgccggaagctgcatgccttcttccccggattctgagggaaagtaatggcctggtcatgcttaccgggcataccaggcttacctgggtatagtcggtgtgactgttggaatcaccatgcatattatttgctcatgttttcgtgtcctatcggacgaggatatattctccggaatgtctcccctgtgttccacgggattgagaatcggcaatccgtgtatgatctttcaagatcgggtggatctgcgaatctggaagaatgtggggggccgtttctctgtcgatttactgtcgacttcctgtcgacttataggaagtgagagataaagaatcttgaaatgacgcaggtacggaatcttagcgagaaggcaaagttccacccaaagtcagagaggagtagaaactcgataggagaagaactatccaatctggcggctttctagcgtgggggtgagttactgtaataccaataccgaataccgtgacatcatgatatttaggtgtttgatggtgtagtcaattgatagttatagcgaagtataagcagagaagacataatcttacattctagaagcaatggctattcgcttttggatatagtcagaagaagacaccccaattagcctaatatccctcatgtcctatccctatactatccctattctccccctatcctgaaccccaaatataaaggaccaataaccgtacgaatgtcgtctcccccactcggcttctgcttgaatcttttcttacccgacccaccgtgatacaatataagtacttagaacaggctctttgatttctgaaattttatttcagatctgaaagacctgttatagaacacttttcccgggtatcactacagcgtcatatctccacctcgacccaagttattacactggaaatccaaatacatccctaaaacgaacagcactttcctttcctctacaacatgctctccgcaggagaacgaccacagcctccccaagctcccgccatagtagattccaccgcaagcaaggcgcgcatcatgccggacctcgccaacggcaccaacggaaccaacggagtgacgtccactacgccctccaaacccgcgaaacagcaacatatctgggtcgtgaccggtccagcagggtgcggaaaaagcaccgtgggcaacgtcctacgcaaggagcttggtattccatttctagaaggcgacgacgtaagtacccaagtacctgaatgcaccacaccctacactccacacacccacaaaccacccaattgcacccaaacccaacaatcacccaagtatacacaaataactaacacaaccctcagtaccaccccgcagccaacaaagaaaaaatgggcgaaggcatcccactcacagacgaagaccgctgggactggctgatctccctgcgccaagccgcaatcgacgtgctctccccttcgaaagccaacaacttccacccacccgacggcgtggtagtagcgtgctccgcgctgaagcagaagtaccgggatgtgatgcgcgttgctgcgtacggctcgccctcggtgcatattcacttcatctacctcaagctcaaggaggatgtgctgatggagcgcgtcgcccatcgcgaatcacactacatgaagagtggtatggtacactcgcagctggcggttcttgaggagcccaaggacgagtgggatgctattactatcaatgttgagggcacgatggaggaggtgcagcagaatgttattcatgctgttactgataagcttgctgagtataaatgattgtttctctctctctccctctccccctctctctatcgttggattgaagggagtgaattcatttgtgtacttggtggttcgtgcgaaaatgggtatgatctatgcatggaggatttagcattgtgtttctgtcgatttttgtgcctccacaatggtgtttggtgttttggccggcttggctatgtcaccggtctgttttagatctggagttcttgatgaagctcgcatctcgggtttttatttcctgctgtttgatatatcaattgtctgcttggcaggcttcgtgatatcctttgatcaattgctctgtctttatcttttacatctcagtgtctctatacaatgtactaagaagctcaatctataagtattgaagccagcaactagataaaccaagtatgcagtgtctttagatatacccgtaatttgttattatttagatataacgaactactttgtcaagactcgtctaattcacctgagatttagaagcataagctcgggcgactcaaccaggtccttaaccctgttacccattttggccattgtcgcaccgtcaatgacgcggtgatccgcgctccaactgaagttaaccatatctccgcgtgtcacctgtccatcgtcatcaaagacgggcacagctctagtcctacccacgccgagaatagccacctccgttggcacaagcaccggagctacgtatgtgcctccaatattgccgatgttcgacacggtgatcgtgccaccactgagatcagcggggctcagctttccgctcttcccaagggcactcagccgcgcgatctcagcagcaatgtcgaagatcgagcgactggcgacgtccttgatattcggaacaatcagaccattcggtgtatccatagcaattccgatattgtgcttggcgcgcatgactagcttcggctttgcggggtccgtggtatcgactttggagttgagaattgggaactcggtcagagcctgtgagacggccttgacgacgaaagggaggaaagtgattttggtaggatcgtgtttgtcaaaggcaattttcttgcggatggcattgatgccgttgattttgagttcgtctgcgtaaagaaagtgtggaatgttcagggatttggtcattgttttgaacatctgtgattggatcggagtcaggttgacaattgactctgcttgccgtgtgtccggtgacacggagactgaggtgggcactgatgttggaagcgctggagaatctctctctgctacaaacttcagtacatcttctttcatcacccgcccgtcttttccggttccgttgatttcgaggatgttcacgccgtggcttttcaatagcccacgtactgcgggaactgcaagggatgcatgcttcgttttgggtatctcatcaggagctttgatagggggagaggttattagagaggattcgactgcttgagttgcagcttggatctcagaggccggggtaggttcagacggcgctgcccttgattcgtgcgccgggttatcatcggggtattttccatccgcaacctcgatgtcgcagagtgcctatcgaagcctgttagtacgttgactgcagtctgactttcagacaagcaagagtgaaggtagtacatacccttcccgtaggtactgtatcgtctgtctcgaagtgtagtttcttgattacaccctcatatctcgatgtaatctgggtttgttagtcgttaacccatagcagggaacgaaggaggcagcacccacatcatcgacagctttatccgactggtattggcacaaaggtttccattcctcaatatgagccccttcttctacgtaccattgaatgatctggacctcagtgatgcctggtaattgtaagtgaacaaattgaggaatgagttaggattatgaataaattaccctcgccgacgtccttgagaacttgtgatttgatctgccatagcagagagctggcatggaattttcgggacaagagcggaggtagggtggagcgaatgcggaggtgattctggggtagacaaggtctgaagttgcgggcagcaagtcccccactgcggctgaaacccattgtaaaaagggaacgtggtagagacagattcaagagaagttttctgaaattcctgaagagaaaaggagcattgtgtctattttatttggcattcgacactcgattgttctgcccgcacgccgacgctaaccgacgctacccacgtgatctccccgcatctatgcaagtatgggggaagtatggcattggcgttatctcatttctttgtatcttttcaaattgctagaaaactcttgttgcttggctctattgtgaagtaccaactcggaattgtcaagcaagtgaatatcactcaggttatatatggacagctaggcaatataagacgaagtagaccaagcaatctaccccagaaggcaattatatacgattagtagagagatttggagtaaatccatatggtacaaatgatggaattcagtctatttgactatagttaggtatagtaagccaaaatcctccctggatggctgagtgggtgagagacacgaggtcatctgtttgctgggtgaaacattgatcacgggtgataccgcattgggaaactcagcaatggtgaaactggtcagggtttcgatcctcgccaggagtagttggggtacggattctttttatatttttcttctttccttgtggtcgacagaccagcccaatacgagggtagcaccttccccatagggcaccttccaatgcccttacttgatatattgacatattggtttaggtatccatgggcaatgatgcaggtgatgctatctccgagatccactgctgtctatctcatgcaggtacggacattgggagttccaccgcagctttcagactccaccgaggatgttaccactctacccaaaattgagcttggagaaatataagattgctaacactgctatttggtttccaggccatgcttggcgggaaaacacaagggtgtacctagggaactaggtatctatcacgattgcaatgattcaacttgccctgtgagtcacccagatctggggtcgggtctcagccacaagcacgcccattcgtaatactctactaccggaagttctacttctgcaataaacaaggatatctcggagcttgcccgacttatgtccgcgtgtcaaatgtggagacgacatcaagatgatcgtcacaaccttaactcaatgcagaatccgaggccgacgctgcaaggtccgaaattcactagaccagacaccgaggcagtcaacgtggtacgtttattgcatgaaacgtttaattagttaataggtacgtacgtcaattgtgccgatcaagatgattacctaggtataagaacatcgtcggtcccccaactcctagtcttgtgcttcggaattccaattgcttcaatcttctgttttgcggtgatcccattatggctctcctgaccaagactctggtctcactggccttgggtgctgctgtcgcccaagctcagctttgggacaaggtcatccaaacctcttacggtcccgtcgaagggttccagtacttcaaccagtccaccctggataagtacttcgatggcgccgagtccaacgtcgccgctttcttgggtattcctttcgctgccgatacgggatatcagaaccggtggaaggcaccgcagccccgcgagtcatggaacaagaccttgaaggctacggactttggccctgcctgtcctagtaactcggcttccaatattagcgaagactgtctcagtctcaacatatggaccaacgcggagaccgctgatgccaaacttcctgtcatggtctggaaccaaggttccgacgaaaccagcaacaatgcgtggtactacggtggaggcatggccttgaagaatgtcattctcatcaccttcaaccgccgtgacgatgcattcggctatcttgctgcccctgagctcaatgaagagggctacaagctcactggccataagacctctggtaactatggtatcttggatcaattggaagttctcaaatgggtgcagaagaatattgccaaatttggtggtgatcctgaccgcgtcactcttgctggtcaatctttcggctcttctcaggtctatcatgcagtcaatagccctctcttcacaggctacttccatggtggtatctcccagtccgggatcagatacccctacgataccatgctggctggcctcgccacctcatacgtcaacatgtctacggctatctccaatagcgctagctacatcaaggctcacaacgtttctacaattgaggagatgcgcacgctctccatggagagcttgttggttggttcttcggaccgcgttaccaacagctccatttggtgggtcaccgcactctccgccggttatcctctgatcttcaagcccgttctagacgactacgtgctcccatccaagtacattgaaacccttatcaatggccctgccaacgatgtccccgtgatcactggtaataccaaggacgaatctggtgcctctcccagtaccgactatactgttgccgagtacgagtactactgcggactcaagtacggaaacctatctagcaaatacttcaagctctacccagaccacaacaacggtaccattgcctctcgggcctggaacgctgctgcccgtgatctctctcttatcggctcttgggcctacgccactgcctggtacaagtctgccactgcgaacttctacacctactactggacccatgctcccccaagccaggaccaaggtgccttccaccaatctgagatcatgtatgcgctcggggctctgtacgccaattccgatacgtacgctttcaccgagatcgactttgagatccaggagaagatgtcgtcctactgggccaattttgcgaagactctcaaccccaacaatggtggctcctacaatggtagcaaatcgttgccgcattggagccccaacagtgccgagggtacccgggttgtcatggaactcggtaaccagtttgaaaatgtgcctattgcgaagccaaagcaggtggaattcatgatggactacttccaccagcaggttccctactagagagtctccctttagagtgacaagctctctagcaaacattagcccagtggttcaatgaatacctacatttacgtatgtagatatgtagtctatgtacactatgtttattgatgaagctagatccacggtatgcgtacaccgtaccaaggttattaagtcaatgacctcaatcagaataacccggagaatattggcaatattgaaccttcctctcattgtatacgatcccagacataatggcttcaatccaggtaaatgaaataagtgcgtacaatatataattgtgcggagtaagcctaggtatttcctaggtaactaactgaagtaccatattcatggaagatgccatagatgttcatgtcctgtccgcattagctagagccccctgagggccataataatactcacgtaagaacgataaacgcaagacctaacatagacacgaagccaagcttctttttcagctccccttggtgaccagatgggttgtccgagaaggaattttggaaaatactttgtgattccatgacctcctattctgtgatagctcttgaccacagtgcaaaggcagagagatcgtctgcaacaatatttacaagagagattcattccaagagagattccttgagcaagtaacggctcttgattttgggccgagttatgagatattgccaccgggtcaatagcctattcctcaaatgataaaccagccgtgacttcaagcacccttggttgcgatatgctttagtttgatcccagcaccttggggcaggcgaactgctgggaccaaccaggacggtttacaaggtatccatctatgcctccttttggtgtgtgtttgtggtgtacataacgctaggccgtagttagtttgactcggcccaagaaaattacgaaataggactgcttttgtcaatctccactccaaagttctccatcattagaacaaccaaagcaaaaacagggggagtaaattaccgagagcagagataaccgaatttcggcgaagcaagcgatagtggattcgacccaccctagagataggagttatctcgcggagaattgctcacccccgcatagaacttctactcccgaggtcgtcgaattcgccatggtatactttgaacgcgctatcttgtactgtgaggatcattgatgctactctcatagattacccgtgtgacatacagctttgatgtctcctcgacgtccctggtctaaatcggaagacgaaaaattgatcaagctcatcgggcagtttggggaccaacggggcagaaacagcaaatggcaagagatctccagaaatttacccgggagaacgaataaggtaggtcctcttcttttatgcatcgggctggcgtgccagagcatcgctgatatcaccatattcacaaggattgtcggaagcgttggtttcattctttagatccttctcttcgcaaaggacgctggacaaaggatgaagataggctcttgcttgatgcctatcaacgaattgggcctgcttggaaggatataggcaagtttttttctatccaatactcttacatgtccggcggctaagtgtacctctagcacttctcatcaaaggacgaaaggatgatcaatgtgcgaaaagatacaatgacatccttaatccccaagtgcaaaatcgtctcaaagtctggacacccgaggaagatcaatatttggcggccaaagtgaaacaactgggtcataaatggactgtcattgcagcaggcctacctggtcgtcctccgctgacctgccggaatcgatggagaaaactggccagaaatatctgtagtgacattggtttctctcaggaaaattcgccaatgccccaatcctctacggagaattcaaggacttcgccgtcgtctcagaactccgagatcttcatttcgtctcctgacgcatcgtctgaccccaccactatcgacctcctagatgccagagaggcatctaccgctctgccttctgattcttcccttttagatcttaccatgaatcagttagattggattgactgccttctttcaacccccacgaatatgtttctgagcccacaaccatctctacaatcacactatcaagttcctgggattacagatccttcattcacacccgcgaatgacaggtctccagatccacaaacagtcttgggaaatactctcgacggcgattctacagtcatacatcaagcctgtggcagcgcacatcaaatacatccgcctctgactcattccatgccaagcagcgaattagaggaagcctctgttcagcaagcaatatcttcatttattcaggacccaacttcagaaatgcataatcctgctgctggcagtatgcaacaccaggagcaccaccatattcatcatgttcatattcatcatcatcatcactatcatcaccattaaaacttttttgaatggtcaatctcagccatgatcaaacgtaaccttattgcatgaatcaagtgctcaattgcatttagctcttcatacctaagtctctcttatatatgaaaagcatggaatatacctgctcttgagaagcactttgtttctaggtgaggaaatggtaatattaactgatgaatgcagcccatcggggaagttgatgctacacaaagtctatttatgcagtcagaatttagtgtaactcgtcgatatttttttattggcttgagcagctcaggattctaccaacaggttaaagcagaaagttgtaatgtagtataaccatctacagaatgaagacgagaaagttaccaaaatcaaagatgatgaagtgtaggattgatggaaggtgaagatctagctactgtcatgaagctctctatatagctccatgctacaaagccgcaagatctcatcctctagcaaccagaagaagcatctctgcaggctcatataaagccaataccaacacagcaagctatctacagaggagtgaaagaaagggaaaggaatgccaaagaaaggtctaaaactgcatagtgcgatggtgagcttgtccaactgcgtcaagttgccggaaagaaattcaacaaaacagataattgcagagcgaagcgtcctcttctattgaaatcgaaaggaagatagtggacaaagtatcataaatggcttttgcagcaatcagtggccttgttttgttcttgagtctgagctggcgacaaggactgagtcggcgcttgataagcgacactctggttggccaactgattcgaaggcggcacgtcgttggtggggttgtatagggcaaagttgtagggcttaagatgcacctgagcgatttcagctggcatgatggggaagtcctcaacacgagggttatgcgtgaacccgaaagtatgccatatgacaatgtcctcatttcgcacactatcacgggcctcaagccacgacttgatgccggtacccccaagtgattggttggtgtaatcaccggccgggaatagctgccgatccttgtacttggtaacccagatggaatgctcacagaactcagatcggcgccagtgccagctaccgggtctggctagaagtaactagagtaagatcctaattagtagtcatagatatttaaagctgtccagtatcaaacttacctgagaccgaataggaacgagtttatatccgatcggggtcaatgagatcgggttctgcagtccttcatttaggatcttgaatactctacccttggaaaagtcgtcttcaacagggccagcacgatccagaatcttctcctcagtgacgtagcccgtaccaagagggttcaggtcatcgtcccacgggatcggaacagagtcagtcgacgcaaaactgttcgaatgacccccaacagcaggatcgatacgaatgttgaacaagtgttgatggtaaggagccatgacaccatcagcgacgcgagtgccccacgggacctttgcatccttatcaatcggctgagtagatagaattccagtggcgcgggtctcgaaggtgatttctccagactgatcaaaataccacatgtagatatattcgtagttggcgacggtaatgatagtctgcaggaccaactgacgcttccgcaccaccgtggcttttcctgtgcggtggttcgtgtgcttccactgaattccattgtcgatttcgtgcaagcagatagaattgggccgaagggcaggactgccatcagcagccacaacacagccatcgaaatacttgatcacgccgaggcagtcgcagccaagttgtagattgtttgccgtgacaccagcacccacattgccgagatcgaaagcgcccttgcggtagataggatttcgagggtcaccgtacggaacaaacatctctgaaagcgaaagccgatagaaggcgctcttgccatcaaatgagagatcgtgaagggttaagccttcacgccagttgaaacccacgcggaaacgccatttttcccactcgacaagctggcccatgacagtaaacgaagcaccttcgggttgcaagacctggtaaggcttcagggttgtacgaggagggttcttctgcaatcggtggtcgtattcgggctcgacgggttgggtacgacggtgtggaacagatgagccgacgggagtcgcggcttgatcacttcctagtggcagacggacgatcttctcgacttgcatagtgcagagattcacaatcaccatgaaatccaaagggaaacagtagtggtttgaatccggatcattgttctcggggtttcgcatgtacatgaaaacctaacgcggattgttgagtcaaaaaaagcttttgttgagactatagaccctgtcaaaacttacctgagtatggcgagtctgggtatcctcgccatcaactccatagtcccagggatcgaggaccacagtggtgtcgtcgatcttgagtctttggatttccgctttcacgcgtggatcggccatggtgacttgggcagcctcgttcatctcggatctgtcaacaggtccatggaagtctcgcgggagctcaacatgatgaacaaactgcttgttggtgacatcgacaatggcctcgaaaaggcgaggagatctcttgatataccagatgaggaatatgcaacgaggaatcgctgggagtggctgactgttgtgctcggcctccaaaaacttgacaagtatatccttcggtggctcttcgaggcctgcagccttgaagtgcagatctacaccttggtagctgcctttgaccaagtccgtagcaagttgaatctcttcgggaagagcggggtcaaggggatgagtggccatgatgacgaacaagcagagaatcgaagaaagaaaggttgaatggctgcagtgggtagaggaatggccgcatttttatcttaaccagcttcgcgagccgagtcaggtccatactccgctccgatcgtgtgtcaacgactgggtactatctatcgtctatggtgcgatgatacggggccatactcaaatggccctccacattatgccttggtggtcaaggatctgtgaattcttctagcataggccgagtcataatcagaaattcttcgacctcattcgttgaagaatccctgtccacttccgatcccgttctatgatttgtatgattgtggaaagttacctatccaaaatttatccgttaagggtgtaactgatcctgtcaggaattagccacttgcttacttcatgatatgaacaacactggacaaaccccagactgaagtccatcgggacacattccccaaaaaagtcctgagcacggcgtctgcgtgatatcgcgtgcacggccccttcctgactcggcccagtgccccacggtcaaacagaggtatatgtgcacgcctacacactccaccagcgaccaactgccaagtcgcgaaaagaagactcattcaccgagcccggtctgggcgatccagagggcgaattcccatccaaatggctctacggaaaagatcaactaaatgtgttcctggcctccgacctcgatttgctcgtgataatccttcctcaaacgcgtgacatgtgtggcatacttgaccgggagcaattcgcccttttcagcaagaggagggcctacgtgagtaaccccggtaggggcgcagtcatcaacacaaacgaactcattgaagcactggagtcgagtaagatccgtggagcagccctcgatgtcactgaccccgagcctttgccggctgaccacaagttgtggaaatacaataattttaccatcacgcctcactgcgctggaaactcgaaccactacactgaacgcgttctcaagatactggcgtacaatttggtaagacgagcgcagaacaaggaggttgtcaacagagtcaaaagtctttaagtctttaggatactagcttggcttcttgtcaggttttctttatcttagtgaagatctgaatagctttttcaatgatatgacgcttttaggaaacatacttcaattacaaaaactgaaccccacagctcaccgaaacccccattgaacactataccaatcaacatccatcaaaacaagccgtgacatattttgtaagatttcgaaaatactgatattgtctgttacctccgagcattcacatgggccgagtcgaacctgggatgactctgtccaatttctgtggcgaaaaagggcgaacgccggcctagaacatgaagaacgagggggcattgctcaaccctacgttatctaggccatgtggaatcttcaaagcttactccttcagattcaaagccgtccagtcgaagtcgatccatgccaatttgatattggaagcctaggtaaaaccagatagcatcaaaattgatgcaaggagccggcctccagtgctcaacgttccacctataatagcacgccaattgtgcagactaatttaatcacagcctccaccctcatctaggggtgtacagatataccccggtttctttacaggttgtgacgagacgttatgaagacgaaaaatgcctggtaatgataatagcgatacgtttgagatccagccgcgaacttgcctctgttatcaaatctgtcgatgtcgatctgtcgtatttaggccagatgactatatttcggtgtatgttgatgaggtatatgacattaagtgtgatcacgcattcactctctactgcgtttcgcccgtattttcttcgatatgtggctctatttctacgtagttctcggagttcagctcgcgagatatatctcatgtcagacccatgctctctgagaaagatagccttggtgcaagtgtggaatctgacttggcgcggggaaatcgaaatgccctaggaatacttatctcctgggtttattggattgcttcctcgggaatcctgaggttgcttatcattggctttgatctaatctgctagtgcctattcacgtatcccacctatcttgaaccttagcccgggccgagtcagtcagtttgcaggccttgctacctaattgattacactcaagcgctagtcgagtgtttctagtcagacttccaattgtataagggcttactatatatcagagaaacgcggcaaactaattcgcatctacgcagaacacccacaactccttactcaaccctcgaacaagacagagtccagactaccagtcgaaatatctatcaatatggctgatacgagccaaaacaatccaaaagatgtcaaagtgagccaggatgagcccaaagatatccaagggaccgtggaagaaggcgagatcagcaatggtcacttaagccgttcactttcacagcaacatttggtaagtagtttgctctcgaggctaactctccaactcaccatcaccccttcccaaatatgctgaattgaggtgtctgattttgacagatgatgatggccatcggtggtgtaattggacccggatattttgtgggaatgggaaccggcctatctaccgcaggaccagccggcctccttatttgtttctctgtcgttggaattctcctttggtttgtgatgcaatcacttggtgaattaggcgcctttatctcagtatcaggctcgttcacccattacagctccaggtttattgatccagcgtggggattcgctctgggctggaactacttctttctatggaccggtatcataatggcagaatacagtgcgtaaatcacaatcgaggacatttgctaacgctgtgaatactgtcattctaacaaaagcatcattgcagataacctcggattgattttaacatactgggatacatcgatgcctcgctggggctggactttggtcttttggtcaatactgcccccaaagcccaatgaaaataaatttgaagctaacctcctcttagggtttttttcatgtctttcgctttacttggtgtatgggcctttggtgaagcggaattctggctcgcattgctcaaggtactggctattgcaatatttttcctatgtgctattctgatctcctctggggtcattggtggccaaaagattggattcaaatactatgaagacccaggtccatttacaaatggggtgaaaggagtcttcgaaattttcgtttttgcggctctccaatacagtggcaccgaaatgatcggcctcacagcgggggaatctcaaaaccccaacaaggacattccaaaggcagtgaaaagcattatttggcgcatcgttgtcatctttctgggagggattttcttccttacaatcacagtcccatccaatgacccaaatctgctaagcgaaagcagtaaaacggctagctcacccttcgtcatcgcgttcaaccatgtaggggcaaaaaaaggtgctgatgctgtcaatgctgtcatcctactcaccatattctcagcagtgaacagtgctgtttatgtggggtcaaggactctgtatggactggccaaagaaggtgctgctcctaagatgttcctttacactgttcgaggcggcgttccgatagtggctttggttttcttccacctactcggattcctctcatttctcaatctgtcctctagtgcaggcgtggtgtacacctgggttatttcaatgacaggggttgcgacattcattacatgtcagtcttatattacatcccatgtcatccagagttctcttgctgatataacatgcttgaatagggggttcgatttgtttatgccacatacgcattcgcaaggcgatgcggcttcagaacgtttctgcgtctattttgccttaccaagcacagttttggccatatggtgcttatctaggatttggaatctcggtctttttcattttttttcaaggatggacatcgtttgcgccttggagcgtgcagaaattttttatgaattatgtcattgtcgtcgttttcattttcctcgccatatcgtggaaattctggcataaaacgagctgggtccaactgaacacggtggatttgatgagtggacggcgacacattggttgatgaagatagaacataccttcaacagtcctggattctctcatagcgccgatcacatccaccaatacaactcttttgacaatcaatcaaagttctatgaaccggatgcagtctcgctagttgcgcttcttccaaacagaagcaagaactcagttcgtactccataaaaccacccagaatagtaccatggggattcgcaaatcagaaagacgaagagtacttttcaacaaggaaaaagtcaaaacctgatagtcagtgtttatattgtcatcgctgtactttacttggtataagatgtcgctaccgtctaaagaagcgggggcaaacaaaaaggtgatgttgatggacgtaagtcaaaaaagcacctagaacctgaaattggcatacagaagtattgaacaattgattgctgaggtgaatcactctaaagaaacattgctgcaaatatagccaagggttcatttcgatgactctgagcttatgggaaccattttagccaagcactcggtcgtcgatagagattttcaatgccgagacgaactttagaaattccaaattcgactcccaagggtttctcctgaacctgtgcacgcacccaatcagccgtgatgcagtctctcgggctattttcgagtatccgaactgaatatccctgctaggcggcgttcccgtcggcaggtgttgatagaaagatatggatttttgtgttgctattagtgcgttattcttgttgcaatgccgttacaattccaagttttttttggcactatagagggatcaggctgatagtgttgaggtatcctgcgtgtagttatgcgagaagaggaagagagttgagattcccatgtaatgttacgacctgaaagatcagcggttacttcctatgattgttgaggagttccttcctgaccgaggagaagaacgttcttccctattgtgtaaaagggctaagcgaacgtattaagaattagggatttgcatatgtcaataaccaagattgttaccattgtgctaccattgcaacgattttgtattatatcgcagactgcaagcaagaatgctgatatggtgaattcttaaagctgcaatctaacagtgaactatcgacgcggataagacatgtatgattattattttctcttcggtagtcaacggtctaagttgattgttttaaatgaatagtatcggcttgcggtatgcgtggcagccgatgttctaccggagggtttcggactcataaaagagaaaaaaaccatatagatgatatattcctagacacatcatcattggaatgaaagatcaaacttccccttaggcattccttgactggccgtgacgttcttcaaccaaaacaagcccccaccttcattcaaagggtccccttctctgccgtcattcctagcactggtgactatgatttcattcatatcctggccaacccaagctccgtgtgtgactcggaaagcgttcaactcccatttttgaatgaactggcctctggggttgtatttttcaacaacagatccattccaaatgaaggtgaaaacgttccaatcgccgtcaacaatcagaccgtcaggttcgccagtttgcccacgtcgatcaatatggactcgttgatttttgatctctgcggtagttgaatcaaagtcgtacgcccagattatttgacgaaacgaatcggtgtggaacatgaccttgtgatcggatgtccagcctatcccatttgaacagactaccccttcatgttggattatgtggagagtctgatctggatcgtatcgatacaggccgccggtcggaacatatccttgtggaatttcgggacgcttcgaatcactggaacaacgagttaaataaaagcgaattgcataaggaagggaggggactcacgatccatcaagccagatatcaagagagccgaaccacaatcgccccatacaatccactgcactatcattcagccttgtcgtctttctatcatcaactttgatgaccttcaccaattctgtccagctcccatcatctcccagcatagcaagtgagttgaaggtgcagaggatgtatccgccttgtcggcaaaaattcatggaagccacagcctcagggaggttgatcgtcctccttgaatacggtatgcacgataggtcaagaacatgaatcgcatagccgagcacgtcgatgtagtggagcgtgttatcggacttcctgaatagaggactttcgcctagttcagtgtgtggctcaaggaatgccttgatggtctccatgctcgatatgctcgacaaactaagatgagttcagatttgtactgtgtatggcatttgaaaggcagcacgctgggatgagaaaagctatgtatagtacttgatagataaactccatggaatggggaagaaccgagtctggaacaggttacgggaccgcagtgctgactcggccctcatcggccccataattaatcaagctcgggagacatcattggtcagaattcacagatgtctttgctgattggctgacgcttatactctactttcgagtgactcttcttaaaaggtattgttatatatgataagcggtcggtgaaaagacaggtaaagaaatggtaacagccttggtttccgacgactatcactagtccgtttccggtattatctgggaaggagctatggactgttcttgtcgtattggaaggaaacgctcttttctgacacgcaagcgagataaaagtatatctaattttgtagggtttgtcgaaggacacacaaaaccgtgctctttgaatcctcgcttgtattttcttctcttcctcttcttcgtactcattgtttcgttagaaatgcagtctcaagcctgacaagatctagtatgtaacataacaataagtagttaccactttcaaatttaaaccttcaaaaccatacgattgtacggacctttattacgccctaggcctgcttcacccctacaacctgttacttagtaccgtagagctaaattgcgatcaatcaatcaatcagtcaaagttcgatttgttacgtgccaggtcttatagaacagaagagtgcatttctaacgaaacaataagtacgaagaagagaaagagaagaaaagaccaacgattattcgagatatttggttttgtacgcctcttgccaaatcatggaatctctaatgcgctggcttagctcgcttgcgtagcagaaagaaacgttcccttcttacatgggaaagaacgacccatcgatcttccagatcgtgaaaaccccaagtagtcctgtataaaaaggaaactatcaaaagaaatcaaaaatttgacggccatgagttgctattatgacatctgaatgctcagaaaggtcatggtctatcgaaaggtgtctcgctgcatcctttgcgagcttcttggaaggctttctcccgggcctccgaaagatacgccagagacccacggtcttttggtgacgggccatctggggtaggattgatattgaagttgaagatctgagttggtattccaacagaaacattcgcagtcggaatattgggcactgctaaaacttttgtttcaaccggagcagtagccagtagtgtgtaggcctgctcatgggagtatccgaagcgctgcagatagtccatagcgtgggtagcagcttggatgtatgaagtcgtcaaatcactgcgtttctgattgccttttttgtccactgagatgccatgaaaagcgagttgttggcggtacaatggctcggcaggactgggcaccacaatgggacagctcaatcctagtttctccattccacccggaaaaaccgagcatttgagcgtggcaataccggccatctcaatggcacatgtgggctcgccatcaccttgagaaaaatggagatccccgacggagagattcgctcccgggacgtagacagggaggtaaattcgagagccgccggtaaggcttccggcgtcgatattgccaccatgttcacgggcgggctttgttcttgcaccctctgttttgatcttgttcaaaaggttctctggaagcttttgtcccacaaaaaccccgttctcgacaggcatctgtgcacagaccactccgtggttttcgtggttttcgttgagggccccttctcgttctgaccaacgttgcagcagctcatgggaaggtgcagtgccgattactccacactgtggtctcccacaaaaggagacatcctttatatggcgagaagatgccattttcccatggaagtcccaaatactcttggccactcttgtttgaggctggtcaagaggcccaagtccgggatcaataagagagaacccccacattcggtctgggaatggctggacctctaaaatgtcaatgcagagcacatctccgggttgagcattggcaagaccccttacttatgttatgcggtcttcatatctgaaaatgtggcgctttggatgatgctcacgtataaaagaagccgggaatccccgtaccacccttccatgactcgacgcatcgaaatatcctaagattcttcaatattcattacctattctcttcgtcatgtcaaaggacaccaaacatccgtcagactccattgatacctcgcctgtcgatgactttcccgaaagaaacacgactttgggtgatctggagcatatgttgagagaccagcaatacttcagtcagagctacggtagacctggaatcaagtcttttgtgaagtcgcctgtcgttgtgctctgctcctgggcagcagctgtctgcgggtttctgtacggatacgaccaggggctcatcaatgtgactctgatcatcgatgattttctcaactcattcccggaggtaaatccagaacaatcacccagagcggctttctacaagggcttggtcgcagcaatatttgaattgggtgcggtagtcggagctttgcaatccgcaatcttttgtgatcgcatctctcgtcgatatactatcatcgtggcggtgttttggtaccttgttggcagtgccctgcaagctggtgcagtgaattacacgatgttggtatttggacgcctgattgggggagtgggcgttggtagagcatcgatgattgcgccgctgtatatttcagaaattgctccaccgcacatccgtggggctctttacactctgcagcagtggatgctgattctgggaattgtatctgcatactataccacttacggtgctcggcatatttctggccattggtcttggcggaccgcatttgtcgctcaaatgcttcctggtacggttttgctaggaatcgtcttggtgttgcccttctctcctcgctggctgggcattaaagggagagaccaagaatgccttgaaactttgtcaaaacttcgttgccttccggagagtgatgcaaggattcaggcggagtggattaacatccgatgcgacattttactccaacaacgtctcaacggacgctggcgagagcactcgaccggaggttcttccttttggcagcaatgcaaagttgaggggcgaaaatggggaaactgtgtttcatcgcgatacatcaaacgcatttatatagggattgttctcaacgctttccaacaatgggttggtgtcaatggtttcacatattattcaaccactctttttgcgcagcttggttacgactatgagcagcgacttactttatcgggactcctttcgattgttcaactcattgggtccactgttccggtgttcattatcgatcgtatcggtaggagaccgctcctgcttttcggaacattcatgttgatgtcatgtcatatcatcaattccgtgatcgttggaatctcctatacggactggccagggcaccaggccagcgctaaagctggaacagcattcatgttccttttcatgttcttttttgaaacctcctggggtcccattgcctggggccttccaagtgagatccttccatctatcgtccgcgctgagggaatggcactcagtacggcatctaactggttgagcaactttgtcgtcgggcttatagtaccatctttggtcgctgccgccccctacggatcgttcgcactcttctcctgcacttctctgtgtgctttgatctgggtgttcttctttgtacccgagacaaagggaacaagcttggagggcctaagtcttctattcaaggacaatgtttatgaagaggaagcagctcaacgaaacgaactcatatcagaattgatccgaacgcatgctcccctgggacaatctgaaaagtaataggtcattttgtccaaacaagtcatggcaagcgttgatttatgactcccacagttccacagtagggaaatctatcacaactgtctgtatgatggcccgtcatgtgactctacggatcgtttgcttatttgcttgtttgcttgctaatctgcttgctcttcgtttgctatttttttattacggagcgaagcgaagcaattatatattttctttctttattcatacatgtcaaaccccaagaatgttaccattgctttgtatatcttttttacagaccgcttatgtgacatttatgtatccattttgcttcctaattgtgcccaaccaagttgtcaattttggaccgttgttagttcagtgagcaaaagatcttgagtgaaaatcgtggcaacgttattccacaagctaccgagtggcctcctctatccaaaacgcatccagaaattagcatttagtcaattcaaccacccaccatgctaccaatacgcccccgaagctctagaaatccaatagagcaagagggtaggatcttattagccatataggcttttaagaatcaagaaatatcctcaatttgtcaagtggcgcgccattttgctataccccgtacacctttcctggctttggacctccgcatgggtccctaccctggaacctccaaccgcccattaaactctagaggttcggtaaggttcaacctcggaggcgaaacaaccaggatcgaccgccaaattgatgacgctggcctttcgttaaggggacaatggtcaagagttctggtgaacaactacatttggatggggctagcgtggtgcattttattgaggtgagctgctgacttagctgctccccgcgctttgctccagtgagcacctgagcaattcagagcgctcagatgatgcccagtgagcgagcctgctgagtatggaacactcaggagcgtgctcagctgtacccagtgagcaaaaagcggcaaggtctgagcactataacggaaagagaaagccaagaagtggcagaggaaatcaaggcgcgacactaattgcctagatcgtacatcgcacatcgtactccgcacagatcttggaaatctccgctttgtcttacgatcgagatgtcctcgcgaatcagccttatgtgccaagaacaagggctcccctatcggagaccatccgctgatccctagtcgaggggtaacccactccagtctcagctcttcaggcagccaatttcaatccatatcgagacgaatcctttgcacagggacttgcgctgataccaatttcatctctgccaattgccaattcaccatggttgccgagtacctcactatccgcaacaacacctccactccacttgtcctgaagcgcattgagcgcttccaggcaccggagaaagttgcgttctatgccttcagtacaatggctagaaacgtcacccaggtcttgaccaaccaaacccgcagcctcgaggtctccccaatcgaacaggacagccgtcccttcgaggaaaagaatgttgacattaaactggagccattcgcactgaagaagaccgagctacgcgcctttgtcaactccgaaaaggagcgcatgcgtctactcttcgaagtcgaaggccacaaataccaaatccaagtcccggtaccaacaaaagagtccgcagaaatgaaagcgctaagcgagaaccccaaacaccgctttaccggcgtttccgtggccccagaatccttattggcaatattctcgtccgcaaacctgaacgcctggatgcgcgagctccgcgacgacatcctcgtctctgcgctctcaatcccaggcacgcacaactcgcccacatgttacatcgcgccgccctcggtgcgctgccaggctgtgagcccgaaagagcaactcgagaacggcgtgcgattcttcgacatccgcgtgcagccgcagtacccggatgacgcggcgcgcgacgagctgattctcgtacacagtgtgttccccgtctcgctgacgggaaacaagtacttccgcgacctgatgcgtgaagtcgacgggttcctcgaacgcaacccgtccgagacgctgatcgtctccgttaagcgggagggaaccggtaacgcgactgacgagcatgtgtcgcgcatcctgcacgaccactacgctaaggcgggcagtcggtggtgggtggggcccaagatcccgacgctaggtgaggcgcgtggtaaggttattcttatgcgtcggtttggattgcagcagaagctgaaggacgcgcacggtgggcatggttggggtattgatgctgctgagtgggaggacaatacccccaacgctaagtgccccagtggccagctctgcatccaggatttctacgaggtgctggagagtatgaatatcgagcaaaagattaagttcgtcgcagagcagattgatcgggctagctgctgtcgctatccgtttggcgttcagcccgatatgcatgcgacaaaggcattccccttttacgtcaattttttgagtgccagtaacttctggaagacgaatacttggcccgagaagattgctgctaaggtcaacccagctaccgtgcattatatctgtcgccgaggtaaagagcatgatgccgactgctcgacgggtattcttgttacggactgggttggtttgaatggagattgggatcttgtgcgctgcgttgtgggcatgaatgccaaactgcgtttgagacaggattagatgataaacatcgtttacatacatccggaggttaggaggaaatttgtcttttaggcgcggcatgcagggaatgcaatgattcatgggttaaacagagaatatgatgcactaaagttgatttcttacaagtatacattgaccctgaagtaggaagcgggggtcttgacgaaacgcagaatatcatctattatacaggaaaatgaatcagaatgatcatgaccagattaggacgattcgctcttgtcgccctccggtcccttctgctcttcttccaacacactccggcggctctccaaggtaaagtagatgctcttgccggctccctccaaagtagttgcaacgctagagctcatgctctgcaaggccatgacaagctgggagcggagaccgtccatgccaccctcgatgctgccgacccacttggtctgatcgatatcaaacacctggttgtccacacgggcagccagcaagttaatcttgctgagaccgttctgaacaatgggctcgtggtattccgggttcgccttgcgggtaggggccttgaagccggattccttgggggcaaggattgacagcgccgccttcatgtgttcaggcgagacgctaggaatggaaaggatagcaacagggccgacgagcagaggagaaagctcgtgcatgcccttcatgtttttcaccgcctcgtaggcagtgcgagacaagtcgtgtgtcaaggccgggtcgtcctttgagccggagagcgcagggatctcggcagaggtttgtgtcacggggtcaactgcacttggggggtttcctgcacccagagaagcctcgctgggtcggaagtactcgacaattcgcagagccgcctcaaagatgctggtctggatagtctggatcttaatgtaaggagcgagggcaggcgctgtccggccttcggcggcaatcttctcatccactttttgcagggcaagggttagttctcgtcggatggcggcccattccatggacttgaggttgttgtgttggaacagcacaatgagaggagatgtgcggagaagggaggtgtacgaccgtaggagctgcgaccggcggtattcgggattgcggtgcgacggtggctgagtaggagggaaccttgatacaggagctggtgagcgtgtcatctgctcaattgaagcagctggcgtgaatgctggggccgcagcactggatgcgctcctgataattcggagttcatattggcatcgagggatttgttgaagcgacgagattcttaaccgaggcggcattgtgattgttttaggtggtgaatttaccaatgcccaggaaattcaagaagttgatatacacaggtcaagataggtcgagacaagccccgggaaatgatatttttagggtcccaaaagggtaaagcgcttcggaggcggtgatgtatattgccgcctatatcgggctctcattgagtcacttgttatgatcttgcaggtatctttttaagcttgtggaacctcattgggattgctaggccactgtaaacatacagtcgcttacaaagatttcaagtatggcgacatctacatcctctccttctcagcggccggagtccatttcgatcgccccgctcctccagcgactcgcctaccccgccgctgccggtattcgagtcagcgcacaagatctcccagctgtgagtgcagaggagattgcttctgcctttgcactaatcttcgaggaccggctatctcaaattcaaaccgctgccctcctcacattgctccactcaaccggcaaggatagacaggcagatgtgattgcgaaatgttctcaatgcatgcgcgaggctgcttgccaagttgagaaaggtccgcttacgaagattatcaagtctcgtaatctgaaagcaggaaattaccagggtggattggtatgcgcatatgcacactccgtccattttgtcattgaggtatattgacagaccgcgatgtatagtgtgatattgttggaactggaggagattctcactcaacctttaacatttccacgacctcctcaatagttgcgtctcctcttctcatgacagctaaacatggcaaccgcgctcaaacatcgacctccggggccgccgatgtcctcaacgccatccagccattggcacccaagatcgcagccatcaccgctgacaacctggcccaggtctacgagaaaaccaactactcgttcttgtttgctccgaatttccacccgggcatgatgcattccaaccctgtccgcagggctctcggtctccgaacgattttcaacctgatgggccctttggcaaaccccgttgactgggcactggaagcgcgcgtagttggtgtggcataccagagccttggcccggtatttgccgaggccttcaaacaaagtggagcgaagaaagccatgattgtttgcggtgcagaggacatggacgaaatcagctgcgctggaaagacaaactgctggaggctctctgagtacccgaaccctgcatacaaagcatcagaagacgatgcagatgactcgagtgatgatgataccgacaatcctcgtacactcgtcaagatcgacaccttccagcttcagccatcggactttggcctctctactcatcccctcagtgatgtgggcggaggtaaaatgcccaagcaaaacgcggaaaagctgatgagcatacttcgaaatgagcttccacgggatgaccccatcttggagtttgtcctcatgaatgttgctggtctgcttgtcacctcgggaatttgcgaggcagataccagcaacatgggacctggcgatgatggtcaggtcatcaccgagcgtggccctgccggtggccgctggaaagaaggcgtgcgtcgcgcacgctgggcaatcgagagcgggcagtctctgaagcatttggagcaattcattgaagtaactaaccagctctgaagtaggattttgtgaaacttaggtagttgtaggcttggatttagaatgccttttcgggtctaagaagctttcggatttggggtatgcaattgtttcacctgttctgatgggtgagctgaatgtacctagatatttcgggtctatgagtgaatgtcattgaatctctgaaagcagatatgattggtttttttttagaaaaaagagcttaagcctgtcctccatacactagaggacatggccagaatatagtatctgttttgtacactgggaccatagaaaaaaccagtttgtgtcattcaacaccaaagcgccattgtatgcataattcgtcaaaagataaagatgtcaaaaccagaggatctcaggtcgattccgcctgggccatcgcaacctccgaacgtctggttcctgtcttaatagacaaaacggctaccgagcctggaactggaccatactattgagagaaagaaaaaagaagtcagcctgggcctcgcgcatatcgcatgataattcccaggaaagagaatcttaccgcttggtccgctctttgtacagcacacggtgaccgcagtccttgcagcggatctggtcgccgcgcttgagaggaacacgggcagagcactcgccgcacaggtaggtaactgaggggctgtcgatggccatggcactgccaaaacctccggcttgggtgtcgaagttgttctgggtgcccatcgcggggacctggtaagtttcgcgagacatcgtttgagattgagagtggcgtagtagtaaagtgattattttgcgcgcgagttgatcgtgtccagtggaaagataagagttgtgaggtggaaacgagctgcttctaagctgagatactcgggattctttttctttctagagcgcgggattttaggtgcttagtcatgcattccgtagattagtcatcgcgtccagatctccaccatttgggagtataaaagtcctctgattcttttagaaagtaggtttggaattctatgctctcataacttcattaattaatagcattgatcgtatttgaaggtatttataccttactcctatacatttatcgtgttataagccgagagcaattcagcccgccatgtatcatcgaccctaacttcaaaattatggtatatcccccagaaacatgcaagaaaaatcagatccccgcgctatgcaaaagaagtaaagaagaggctgctaagagaaccaccacaaagttgaatcatgcagcagcaaaatggagcagagaagagttaccaaccaccaccgatcttccctgcaagctccacaacccgacttgtatcattagcaggtgtttgatccttgccaacatcactttcgaccttgcgatatgtagtatagacgagcttggagatggggatattcatatattctgaccaggaccgcaagccttcatgaattttagcctccttgtcagccaacgagaacagctgggactgagtctccagctcagtctcagactcagattccatggaataataagcctcgtcgacgcgagcaagccacgcgcgctgctcatgtggtgatggtttcatagatacgtctagtgcttctccttgggaaataccaagggtttctctggcgtcctcgactcggatctggccaccgccattcgtgcacccaccaggacaagccatgacctccacataagcgtagtctgatccagagctgcttgtggacacggcgttacgagatataggctggcgccgccctgcggcgggtctagcgacaggtctggcggcaggttttgcgccaggaagcctcgacacacgggcgggcttgagtttccgaacaaggttttggatatttcggaaaccataatagcgagctgctttcaaaattgtttggccctcttgagacatgagcacgtactcgacgacatcgacattgcgtccgcggttgatcacaagtttgctgcctgaattgcgagcttggaaagtcatgagaacctgatgtaggtagcctccagaggtacctgcagcaagagtttgttccgcccgagagcgcttgagggaaaggagagaaccgagagttttttcagggaagggcggtgtgaaagacaaaggcagaggttgcaaaggcaggtttgacagtgagaaccctcgagacgaagctagggatagaagctcacgtgcagtgataacacagtctacgtcgcgaaccggctgtgtctcagagctcgtggaatctccctgtcgccacgacacatctgtgagttcttctcgactggcttctagtttcttgtcaaagcagggcatgactgctaaatgccaaatccgcgaagggtggaccccgagggacttgctcaaaacggttttgaggaatgtccccgatagagcctgcggggacttgagtcgagaaaggtgtggaaggataaatgggtgagtcttttcagcgtagcaaatccatccaggacatgctgaggataaaataggtcgtttggggagagagtcatccgactggcccgcggttgttgagtcctctgagttgagggagtccgaaacctcgtctgcagtgagcactaacacagcctctcgcatggcattggtgtcgacaacccatgtaaatccattgccgtatttacccccactccgcaagccctgcgggccactaagtaattggttgatcatgtaccccgcttctttctccgaaatcccatatgttgtggcgatactagccctgacttgcgggctgacactggccacgaagatcttgccctctccagaatcctcggtattattgactatcaccccatgatgctcatgcttcaagggaatctccggatgcgcgtcaagtgtattgaggacctctgcgtgagactggagtgatatcaacactgcttcggcagatgtaacacagccagagcaagcgagacagtctgtcaaagaaatctgtgcggggggtagatcctcgggctggactttgtcttccgttgttacttcataggcgtcctataattagagaattagtaaaagaaactcaaataccacgcagttccaatgagataaatgagtggacatacttcttgattctttgtatcctttggtggaagggtttcaactggtttgatacacgcgaccccgggcgaaatgaaatcattcagatcgtctgctgacaggatcgcgctcattgtggcggagtacgctttcggcggccgtgaatgcacagaaagaaatgactaaatttagccaatttgattgcaaggagtaatgagaatcaataaagacatcgaaaccttggaggatcaaaatagttcttcaagagggcgaatagttaagccaacggcgttgcatgctttgtcatggtggcgagatcggagatgatctcaccgccttatgcgggctgcacttgccttgattggtcagattggaactatgcacgtgacctgcttgatgtttctttcaacttcgacattctgtgagagttgcgactctttgtgttctcttatcttttcagttaatactatgtatataggtaactctactagcttacatgtagtcaatgaataagtaaatacagtccataaagagctactggaatgctcttcttcatcaaattatcaacttccctactgtttttctatcattaggccatgcgagcgcctgtccagtccgatacctccagatcgacacagtccaaacgatcaatagataccctgtacgccaatcaatcacccacaagcaaaagcaactgcagcagtagcggcctcactagagcgatgagtgacgttggtgttgatgttgacactggcgaccttaacacgccgcccgtcactatagtcggcttttcagatttcgtggcaagtcagcctggtgtacttgaagagcaagataaggtcgacacgtctcccctggctgggaaacgccctcctagtactcatggaaacaagggaagtggagtgaataaggtttcgcgcgatgaaatgtggcaggtcattacaacaacaacgaaagccgcgataggaattctgcacaaaacagaattggagggaactaagtttgcttatctggcgaacatatttaacgctccagtcctaggccttaaggcccctaacctcagggagtatccaaacctaaccactgtggttagggtcgaggcgggagacacatatgaccaagccctcaagatacacaatgctggcagcaccatcgatctaatgccagtatgtgttcttagctttgccaatggtgaaatgcccggtgggggctggctcaacggtgctcgagcccaggaggaacagctctgctaccgaagcacactcgtttacactctccaccctcggttctacccaatgcaagatcatgagtgcgtctattcacccaatgtgatcattttcagagatagcgcggataccggatatagcttcatgtcggcggatgacaagctacacatgaacccaactgtcagtgttgtcagcatggcagcgcgaagcagacctcaattgaccgccgaccaatccacgtacaaggacgtggcacagcgatatcttatgaaagcgaagatgcaattgattctacgcacggcagcacacaacaatcaccgccgcttggttctcggcgcccttggttgtggcgcgtttcgtcatccccctcaggaggtagccgactgctggaaagaagttctcatggatggagaattcagtggatggtttgagttgattcactttgcaatcagagactcaaacgctgagaataatcttgcaattttcacagagacattggatggtttgaacatgggataggtttaattccatttatctgtgttagcttcttccacttgggagaagtttggggtcttcttagacaggcgcaaattaaacaagaatcttctagtcaagttgtgtgttaaagaagtggcattgacagtacggaataaagcgagagtaaacccaaatttaaaatactgcctggcaatattaatcaatgggagggccatgctccgtgtcacgatatacttatagatcgccagtacttgacttcatacacctcacttagatgtacgtgtagatcgtctcctgccagcaacggcgggctttaccttctcctcctcagagcactcactctttatagtggggttcttttgttttggggctcctcgcttctttgtctgtgtcgtttcttccgcttcggactcgctttctttctttagagccacacgcttccgttttgaattggccggtgcggattttgcagcgttttcatcaatatctttgccgacagggccagtcttcttctggacagctggaacaacagcacttgttcgtcctccaacggtaaggaacgtgattttatccccattcggtagggcggcgggctggttcttcttcccctttccccagcggtgtttgaaaagccagttctcgggaaacttctctgaatccgctagcacaccaatagatgtagagcatacataatgaatggcagagtgcagcgccttgatctgatcagcattcaaagtgttgctgtattgctctgggtgtatcttggcatgatagagaatctcgtcgcttaatataattagcttatttcatggcttttgtttacctggaagacctaccccatccaatttccgattccactgatattcgcctggtcgagcagaaaggccttgatcggcactttcttcttccccagcttctctgtcaaccatgcttcattcacggtgtctttatcggcaaccggatcaggcccattttccttgagcggcgtatgattgcggatctcatcagcgggacaatccaccagtctaatgcgactaagcctgcgggcatccacaaatgctgcctctgttttcggctcgtcgcttgtctccagaaggaacttccaatatttaggaggccactcctgatctgccggcttgtcggttcgatagtagtatgtgtcggcatccttgatcttcaaccaaccagacatcccaaagtgcatcacagcgtgtggtggtgaagacattgtgagccagaaatattttccttgttggcctgctcccacaatccttttcccttgcattgcagtttgaaattcggaggcactagtgccaactttgccaaatataatatcatcatgttgggcttggactttagacagtgtttttccaaccaggtgctcacgaatgaaatgcacaatgcggtagacctctgctagttcaggcattttggtatgatgcttccagtttcagtagtaaaagcatgtaataaatgaattcaaaggcaaatacaagtgcttttttcccgaaagacgatctggcataagcagacgcgatgctcctaaacgcgggtcgcgttgtcacgtgcatatagttgaacaggctagtcctaaaacggactggtgcttaaggcttgattacggcatgacgacggtggttgacggagactttgctcgggctattcatgaatgttaccaacaactagtatcagttcgttattctgctcattgcagtctatactaggcctcagtgagatatattcagcatcacaagtatcaaagatacgcttataacgccattggacgacctaccttcatcaaatacgcctactcacatccttactacaaactggagtggttttgggccaagccgaatcgagaagctggcgagcacactggtaggagcatgtcgcaaccctcatctacagctcctccggcgctgacgcctcggttctgttttgacgagagactactcagaggttcgttcgaaatatgacatcttgataccggcttatattgactttactatttcctctttctgttcagattttctccgactttcaagatctacgatcgatgactcgattacacagaacttgaacgcgttgattacaccagcccagagaggatttgacccagcatcaacagcggtgcgacaacccgagtctggctctcggatcaactccgcagcgtgtcagaacttcaaagataatgtgttattcccgtcatggcaaacgagatcagacgttctcacttactgcgctggtgtggctacgagtccggatcccgacgatcccgacttgattcttcggcagacagaatccgcccgagaccgggaacgagaagttgatgagcgtctggatccctactccgctcgtttctttccacgtgaaccacggactgagtcattggccaatttaattcgcaatgaacgcacggtcgaagagatcgttcgggcccgaacgtgggggatggtgtcagaaaaatgcagtggatcttcttctacttgggaagaagctctcaatacctggcgccattcccatcagaaatgaatcctccagcaggagcgtgccgcagtatactaggatcactatataactcaactcttctttagactcgggaaggcctcatcccaaattgtacagatttgcacagatccgacattatcatatccgtttatttgcatcttcactttgcttgcagtagaatacattactttaagaaactgaggaatcctttctagctcaaactttttgtgctcttaagacagtgaaaatttgcactacagtacataacaaaccacgtgcgcatcacgagatgtgcattttgccccctattgacttcaggtatatatggtcaatggttatacgtattcaacctggtttacaaccaaaattttacttgtgaagaagtcggctgctcgctatcttatcggaccattagctctgccaagatcggactcggagaggtcgtcccccgcacacatcgattcctcactcgcacaagtcaggtccctcgacgtcagcatcgcccacaatgccggaaacattgagcaccaaggaccattccttgtttcgtcaagtggttcaccactttgagatgaaacagtataagaaaggttggcctccgaaacgaccctgaactacctaggcttgtctaaccacgttttactttacaggtatcaaaatagcagaccaggttcttcgcaaaaatccgaaacatggcgacacgcaagccatgaaggctttgaatatgagccagatagggcaattggaggacgcctttgcgcttgctaagaaggctctccagaatgatatgaagtcgcatatcacctggcacgtgtatgggttgctcttacgccaggagaagaactacgaggaggccatcaaagcataccgattcgccctgcgtctggagcccgaatcgcaaccaattcagcgtgatctggcactgctccagatgcagatgcgggactaccaaggatacattcggagccgcagtgcgatgctgcaaactcgtccgggcttccgccagaactggacggcgctcgctatcgcccatcacttggccggggatttggcagaggccgagaaagttctgactacctacgaggacacattgaagggtgccataccacatgtcgctgatatggagaactcggaggccaccttgtacaagaacacgatcattgctgagactggaaacctcgaaagagctctagagcaccttgaggctgttggataccgatgcaccgatgtgctcgcagtcatggagatgaaggccgattaccttttgcgactggaccgcaaggcggaggcggagggcgcatatacagctctcctagagcgcaacccggacaactcgatttactacaatgggttgatcaaggcaaaggatatccccgaaagcgaccacaaggcattgaaagctctatacgatgagtgggtgaagaagaatccccgctgtgatgctgctcgtcgcattcctctcgatttcttagaaggagacgatttcaagcaggctgctgacatctatctgcagcgcatgctgaagaagggtgttccttcattattcgtgaacatcaagcagctttacgttaacccagccaagcgtgatgtagtacaggaattggtggagggatatctctccgaaaagacagcaaatggatccgcggagtcgaacggggacaacaacgagttcctgtcatgcacatactacttcctggctcaacactacaactatcacctcagccgcaacctccccaaggctatggaaaacgttgagaaggcaattgaactgtcgccgaagtctgtagaatatcagatgaccaaggcgcgaatctggaagcactacgggaacccagagaaggcagcagaagaaatggagaaggctcgactgctagacgagaaggatcgtcatatcaacaccaaggcggccaaatacgtgctccgaaacaacgataacgagaaggctctggacctcatgagcaaattcactcgcaacgagaccgtcggtggcacattgggtgatctccatgagatgcaatgcacctggttcttgaccgaggacgccgaggcgtttctccgacagaagaagcttggtcttgccctgaagcgcttccactcggtttttggcatctttgatacgtggcaggaagatcagttcgacttccacggcttctctctccgcaagggaatgatcagggcctacgtggacatggtgcgctgggaagaccgcctgcgtgagcatcccttttatacaagaatggctctcggtgccgtccaggcccacctacttcttcatgaccagccggacctcgtgcatggaccgatgcctagcggaattaatgggatcgattctaccgatgagaaccagaggaagaaggctctcaagaaggccaagaaggagcagcagcgcttggaaaagatcgaatccgacaagcgtgcagcaaggaaggcagctgccgctaatgccaagggtgccgacggggagaccaaaaaggaggataccgatcctctgggcaacgccttagtccagactcaggatcccatgaaggatgccatgaagttcctgacgccgttgcttgattcaagccctcagaacatcgaagcccagtgcctcgggtttgaggtttactctagaaggagtgagttgatatggtagattctaataccggacgggaccctcatgctaatacgattatagacaagcacctcctcgccgtcaagtgccttgtggccgcccattccatcgatccctccaaccccactctccaccttcaattgcttcgcttccgcaagtctcttgagagccttgccgagcctcttcccgaacaggtcgccgaggttgtcaatgccgaatttgacaagctgcttccaaagacccagaaactcgacgagtggaacgagtcttacctctcggctaacaagggcagtgtggcacatgtgcaggccggtttgtctgcccgtcaactcctgaaccctgaatccaagccgcagtgcgaacaagatctgcttgctaccctcgattcccccgatatcactattgacgaggctgtcactgccttggacattttgaacaagtggggcagtgataagactgcttacgccgagaaggcgagcaagaagtggcccgagtcttcggtctttaagctgaactgatttgatacgaatggagaaccgtgtggactcccacccccatccccgcttcgatcatgagttgcctagctgcctagcaatataaggagttaggacaacaaaataaggttacagacatagagaaagacacgggatgagcaaatatactctggtattggccgatgctaagtgcagtgagtatacaggtgctgggagaatccaatgtaccagtacaatcaagccagggctaatcgtagattaatctactccaaaattcaaaatcactgtttctatcaatgtacatttctaaaatcggaccttcaaacgccttattatacaagccgaggagggagtcacaatatgctaaacaaaaagaccaacacatgccgtgctgaatgccagggaagaatccatcccgtaaccgttatagtatataacataatttcaaattgtgaagatcagacagaagacgtctgaatatctcttcactgttcgtcttctccgtcgatgttacccaaaatgggcttacgtctcaggacctcgtcactctcgccgtagccgtaatcgatccacatgcgcttccagaaaggcacgtgagccggtcgctcttcgccaagaatgtattcctgttgctcggcgatgcgttgagagcgcgcctcatcttcttgggagagggtggcgcgctgcatgcgcgaggcaatgcgcggatcaagcacgatatcgtcgagccactcgcgttccttcacgttctcgtcttcatcgcgcttgtgcacagacttgtgccactcaatttcagcagcctccattacggtctgctgctcatagttgcgaggggggaggtcggtgaacgagctgtcaagagaaagtgtggattcgctggcgggagtagactcggaatctgcgataaaggtgtcttcgcggtatggccgtgcgctattcgcgaggacgagtgcggcaacatcgcgcccgacgtcctcggcaaggtaacgttgtgtgagaaagcggtagattcggatcggggtgttcaggaagccaaggagatggggaaattcaactggggtggagctgtcgaaggactgggggatggtgttggggagggtggcggaggagtattcgctggggtagatgtatgcaggagtaggaccagctggcttggcaggcttctcttcttctttcttctcttccttctcgggttcctcgatcttaggcgctgggatctcgtcctttttctcttcggagaactcgggggaatcgatgctcgcaatctcagggaccgcgagactagcgggtttctctgcactgacgtcctgcgatagatccacgctcaactcctccgcaggcggaagcggcgcatccaagggcccgagccaaccctcatgcaagccccggatatactccttccaggtgtgccggccgatgatcaagtcgcccttggggcccggttcgtcagtgaccccaatgtgtgcccgggtagcagcaacgactgcatccacgccgacctcttcgggcgctgagctgggctctccggcctttcggcgcagcttgcgaatgttttctgccgtgttgaatctcacatcgccctcacgtcgcccttcgaccactgtgtaatccagcgccgcggccactaggatgggcttgacatattccttgaagtgatcccgagccacacgaagaccgtctcccggtggcgcagcaagatataccgtcatcttccggcgcatttggtcgactggcagagtttctttcgaaatgtgggccacgagctccgaccacttttgttgcacgcgacgcttctcccgacgatcgtatataagagcaccagcgaatgatccagtgatagtaaagaagatcatccagttgcgagagggcagtttgaaccgcatattaggaagacctattaatcacagcagtattagcatttttaccactcgaatctggggaacagagacatacccatcattttgaatactgggttaggcggcttcggggccaccgggggcttgccagcgccctcgggcgcggcagagctcgaggaatctgccattgggctgtatgatggagaaatggcttatacgtataaataaagtacacccggggcatgctcgttcggggaaaattgttgcctcgggattaccttatcccgactacacgtgacttggtatcagactcggatcgggtcgcgacatgtgaaatgtaaataaacggcacgctgtcacgtaacctaccttcaatgccgccgacataaaagacccgtctttgctctttatcaccggcgaacgtctttattcacataacctcgcagcctttttagaaaggtacacctgtacctggaaggtctctggtttctggagcggcacttcctagagtaaatcaagctcctcgattgccgcttaaaagcccaattgtaccagtcttataacctatttaatgcgcctatacaatgagaataacatatataatgtaaagctacgtgttattcgatgttctctgtttctgtttttttatcagagaaatcgagtgtgaatgtcaacggggcatagtagaaactgctctgaaaagaaatgtcgttagcatgctttataactcgagaggcctgataccagttgagaaaactccgaaaatctttctataacgaaaaggaaatcggtgagtattggtggtggtatatatactacttcggccctagctttcttattcagtgtagtaaaaaagtaggcaaaaaaatgtgagaattcttttagtatagtactatctctactatctccccttaactgataggtatatagaaacaattcccgtttcccgctagatactattattgtatacaccctgtataggaaccctcctactgtaaagccttatcccgcccttaatgaggccgtggtccatttgctaattataggtaagttttctgacaagttcttactataagacgtttaaaagtagggggaatcccctgccatagaatatattgtgcttaaggtatggcgaccttttagtactgaagcggtcactgaggaggctctcgtgagcctaaacgaataaaaggctaactctgtaaatcgtatgctaactttctaacccattcgcgaactctagttccctcttctgctgaatcattttggcgtagtattacccacgtagatacttaaggtcctggtgctttgttggttaataataggttattagccgctaaagtatatgttttagtatgatcccattcctactccttgctcgtcttctatggcccgatcaaacaaatcttcgaagtcgttgctacaccgaaagactgcaagattccccgctggatataactgaagcggttgcggcttaagcgaactagcgactgccctggaacggctcgctggtatgatcttttggtctaattgttaattataagaaacgagatttttatactccctgtttaagtttggcagtaatcagttattaaaaccacccttttcagtttggtatcgctgccctaggcggggtacctttctccaaaatagtcatgtagtcatataccacgtcggttacattcgggatttaaggcactatgtattttctacccccttttcagtggtaatcatggctaaggcttcctgtccacagcccccttcttccatacggagcattcccccatactgtggctgtgcttaatatactgacctaaaatgcgagcctgagctatatcagcctcagaaccagatatataaaccctttgttttcccttgtctaattcttccttagacctcggacgtaaggaagtctatttcccactcttcaatgtgcttcacacaatcctcggttacccttaatccaccacgactttcctcggttggttcttgtattattttcttgaaagaaatacgcgctaatctgtcttgcctcggtctagattgtcaagaatgtcaacatcctccagcctcagaaaagccaagttgatgaggcgctggaaaaaagccgggattgttggtgtcacctcgcatcactagcctgcgcctatcgggatcatggcttgactccggagtatacaaacccgcgcctcatcctctataggataccaaaattctaaggccggcccagaaaagtccatgttcgcccttatggtgtctctccaattcctgtgctttgtatgggcctcttctacttggaaattggtaggaaacccgaactgctatatgatcgagaaagaaattacaaattctgccctactgaagattggtatcggtgttgctacttcttacggtctttgtgggagaatcttcagttcttggattggtataacagaagagagtcacgccggtcccaattatctagggattctcacagttacatggtgttatatactctctgcgctgctcgttgaaattcaaggggagggcgctagtacgtattatacaatctctgagaccgatggtgaaaccctctccgatcccctacagatatatacccttgacgttggggaagcgaatgataatgtggctcgatggtggtatgtgatactcgtttaatatgaagggtggagagcgatagtgaaataaattcccgaaggtgaattcctagtactatgggcggtgtcccgcacgtgtcaaacacgcctcagaatcaaacagaagagatactcgccggctttagcttgctctcctttaactttagaacaaacctttgatgcccttactgagtttgcgtgtttccgtgaactgggtagccaatcacctattactcttatgacagctataacgtttctaatgcattaacactatggctcaactgtctaactaccatttctaatagtcactggtggtaaactgcgcacggttcctatttcgtagatatggttaagtttaattagagacctgccctactatatgaccctaagctgtagtccggaagtagtgatgtcgattctttacagatcattctgggaacttgaagtaccttataatctctttaacccttggttgtatctagttcttaacgagatactaagtggaacttctggcacgtaacaatgattacgaaatacttgctttaatggatgcaatatattgaccaaatattagcgctcactggatcggggtagcgataagcgagttagccctaaaaatcatttaaaaggtaagaagataagaagaggtaggcctcctcttgacgcacttgcctttccctggactggttgtccttaaagctttatagatactgtaggcttaggtccatatacttgtgtgaatgcggaatacatttcaaggccagacgtgtggcgttttctccacctccctctaaacgaggacgatgacttatgctattgcaatagatcctatataccctgggcaccctgtgggatctctaaaacaaaagattgcgctcttcgtgtgacttcgcacttgaaatgcaatcgatatgagtaccattaccactactagaaccgggacacagaagaaggagcgattctttaggaccatggattttcaacgacagatggtttgatgcattctgaggagctcactgtcgctccatgcagtttgtagaccttctgtgtggcattcctttccctttctttctcttctctgacagacagctcaccggcaaacgcgcagcttgccgcgtcgacgctttcctttgtatgtctgcagagatgcttctcctgtgttctggtaggtagaatctggctgccttggtagtacgaagctatatagacaggcttcggtacagtagctagtttcgcatcttccatcaacacatcttccatcaacatctcctggttgatcacttcttccctcgtagtcagaacctctcatcaatcgctgatcaagtcacaaggtacgtgaaaacaaacattctgtcggatgagacgttcaaacatgtttcaagtgttggagtagagtttgcacaggcggaagacgcagcgcagtgcctgatgagaatcctcggcgacaggagtatcaacgggcattctttactcgtctcaggaagaaaatgggcttccagtggatacattgatctggatctggaagactacccaagcaatgcgttgattcgcgagatccaaggggaccaaataaaatcagctcctgttgagcttggattatttttgtgagcagcaacaaaactggctcaaagtgatgccaccgtgggaccaagctcttggtctctttattcggtgttttgcatttgcaaatcccgatatcgtttgttctcatggcagtggcatgtcataagcagactgcaatgtgggatacagcatatccggaagccccatatacccattgagtatgtcatcggtgcttatgttccaaaggaagtccggccataagtctgtatcatctacctgtgcaacttgtgtggcgccataagtttcacccatcagggaaacatcttgcgagattgcgctattggccaaagtagagggcccgaagccgccatcggataatcctataggtatttgggctgtatcttcagaaggcaccaggtgatacttttgctcgaaccattcaaggatatgccacagccatgcctcgtagaagtacttagagtgctgtttcccatctacagccactctgtccttgctgagccattggattagttgtaacacagtccgcaaaatgtgtggcatgttcaaatccgagcaaagggcacgaacatgtggactgcgtggggcgtattttgcccccatgatggccagtttgcagcctagaaccaagttaaagcccgattgcagccattggatatgactgatcagccgatgagtcttcggagccaatgtgaaaaagtaatcaaagaatttctttgcttcggtcatgccgcggttgagaaattcgacctggaaaggtgataagtctaacggttggtggccacttttgaggtgtggtggtagccctgggtctgcatgggagcgaggcgcgggcgaagccgaatagttggctgtttcatgtttttcaaataagcaagcctggcatagaaacaactgaagagtgtgtagttgaaattgaaagagggctaaaccgtgggccgtgagttagcaatagtttcagcgtaatcaatcaaattcacaagcggtgtcacttacaattgtccgaaggcgttgccgacaaggtcgttctgtattcgttgatttcgatttggaatgcatgcatatcaacctctcgtactggattcgcagtagtggccacagcatcatcgatccgttcaaagatttgttgtaattttactaattgtactaagcagcgatcactggcaatctcagcattggatagtaatccaagtgcatgcttttcaacataggacagccgagtcatcatgcgatccttttgcaacattgtcgagtgactgcagacacccatacccagtcagtaatatgagggggatatgggcattgttactgaccatgaggatagcatgtaacatccaatcaaagctcgtcttctctcgttcaccgaatgtctactactgttttcatctgaagagaccttgctcatagccatccgtgaatagtatgaatggatttccgacaaccggtcaagccgcaaatcaccgacgatactccaagcaagattaatgtagctgcaaaatctttcatgctgggactgatgctgcaacctgggatattgaggctttgagtcagtagtgtcatcttcaataaaaccacgttggattagactcaccatgccaaagccacaagaagccccagcaataaatccatagatggattatgggcgaagatcatctgatcagcaactgctttttgaaatgtctcttccaatatctgctgggaggctgcattcttgtatgatgagaccttgaggatagccagcaagagaagcggtttctctgctcgcagctgcgcaagcgtcacttccggtgcgatatagataaaagggaaaaatggcatcaaggtttctcgaaaagattcaagaatcgtgacagcatcatcaaatctcacgatcccgcgatcaataacatctcggggtttatccgggatggaatgaggttctgggtcaggcaggactaaaggaacatcagcctggtgtttagtgtgctgattattgacgacttgagctaagagctgatccactttggcttcgagagcctcgactcgtctgattttttaagcttccgtcagcttggattcacagtcacgaatcaaatgggatttgggagccttacgtccccttcttagcggggttgtaacgaggtcgagcgggccgaaaatagcactctttgccaaggcggcgacatctgagctcttatattagcatatggttatagttgagaataaacatgatgttcgagttccactacttgccgatcacagatagaggaatccgaagttcggatacatctgattttgccacgagcacaattttgacatgttttgatgtgtcctgacatagattccatgttccaaattggtatagtcacggtgaaaggagcatcaggacgaggcgagttgaagaggataaggataaggacacggacaaggacacggacacggacaaggatacggtcgaagggcaaagtcttggcatcggtggcccgccaggcaacggctttactagggatccactacatcgtatcaatcttgatggcaagttgattattggtttgactatggattcgaaggatttgggagtgagattatctcaagttgaagctttaaaatacccacacagcctcgtaatgatcattaactatggataggcagcgtcaaacacctttgggtctgcacataaatagtgccgaatctagcatggatttgctgatatcaatttaaccacagcactcattctcttcaaagtgatttgatctactatatttcccaagcctctttactattgcgtgatcatgtccaattcggataattgcactttgcagacatgtcctttagatgatgcttatatccagtatcagcctaacgtggccgggaacatcttctatctcgctcttttcgcaatcatactcattggacagatcggtacgggtatcgtatttcgatcttggactttcatggtgccaatggtcgcgggccttatattggaggtcataggatatctgggccgaattctcttacatgataaccctttcaacttcgatgatttcttgatgtgggttactgagcctaccacataattgaatgtatgctgaccgaggcgtgatgcattaggtatctgatatgtctcaccattgccccggcattcttcacggctggaatctatctatgcctcggtcgtattgttacagtttacggcgaagagttctcacgcttaaaaccaagatcctatacctacttgttcgtgacttgcgatctgatttctctgatcttgcaagcggccggtggagccatcacttcaattgccgaagtacagtcacttcgcgatactggtgtcaacatcatgatcgctggactggtctttcaagttgtatcactagtattgttctctattctagccattgagtatggagttcgggttttaagagggagaggcctgcattcccctactcaggaacgaccgacaaactggatgaggagatcgttcttgcttggtaagtaaaccacctcgatcttttctatgggcattccactgactcgagtttcattatcaggtttaacaactgccgttctaactatattgatccgatcttcattccgagtggccgagctccagggtggattccagagtaaattggccaacgacgaaatagccttgatgattctcgaaggcgctatgatttcaattgcgtgcatttgcttgaccggtctacatcccgctttgcttgtgggtaagaactgggggacgcctaaagcaattgcacgagacttggaaatggaagataaataagccacaaaaacaagagggactgacgctggttatggacctgttgggtcggcggtttttcagccgccaaggataatcatggtgcatacaacaatgctttttggatatcatttgaggttatggaatagctatgttaagtctttgtacggaagtcactgattcgattgaatgcaatatctattcccccatgttattcttagttataagacttttcccgaccaagtaagcactcacttttgccaataacgttcgacgacagcgataccttctaaggtctttagcttaaagtttagagggagccatctaagactgcgaaaatgttccagtctggctcgagtttcctcgcaaagaatgggatcggtctagtattggtgctcatcggtttgagccgaatttacagatgcaggtgctatagaggaggtcaattacaaagactagggtggaaaattcgtattataggaagcgacaaagtcgaggtcgtctcgaggcgtaggtaacgaggataggaggataggaggtgcaaggataccggagaggagggaaggcgaagcatcttataggcgctcaaatggaccgggcgaaaaggaaggggacttgaattcagctaaaagggaaccattctcggcgtcattttagtggccagtagaaacgagtgtaaaagccgtctaagtcgagcgtcaacatcaggaccggaggatgactaaaattactgggcgggtgcataatagtggtgttatagggcagcggtcaaggggcggctagacgtcccaaagttacgggtgaaaaggcagccgtttctggcctcaaaagcggtcattttcggcgtcaatcccacaggtcctcatattctagttgtaaatataggctcttcgccctgttctggccacccgagtccctgggctttgcctttacatgaatactgcaatcgtctaggcgaatcatagaagaagcaactgcctgacacacggcatgcaggccacaaaataccatcgtcttctggaagcaaggcatggaatgataagaaagtatacatcgtataacctggagtactagagatagaacatgattaccaaactgtctttatttcgactccccggtactggtatgattctctgccatctctaatctatctcagcttgctgcttagcaaccttggagaaccctgtgattgtgtgttgagttgaattgaaacttatcgcttacccaaccccctgaaaataaacaacgcaatcacaaaggagatgcaaatcatgccaaaattcattcattggaccgcggtccttgcatactttgtgattccagtctgaacagctgttgcaatagcccaaagctcgacccaggctatttgctgtcttcaatagcccagcaccaagcgcctgctcctctggggccagtgcctcagctactagtaggcttatctctggccggataatcccaacgcttgagcatgtgagtattcgtagtctggaagaatggcccctagttgtctggtgattattagctagacctagatagatagatgccacttgtggaatatatgagtacatagccagtgaaatgttttacgaggcacttgcacttggtacttgtataccatccacgagatgcggtatgactggtccgactgactcaggcgattcggcctcaagagccacaaaagtatcgatgtgaagtaattgtgaatagggaaaatggtggcctccttcttttgctatcacgtcaagtgaactagccaatcacaccatcggacaacgaatgccattgagcttctgggcagccactggggcactgcctcctatcctcaccattcaagatgacaattcaaccgactatgaacgccccgagccatgatatccaactgcgtggcctaagtgataatagtgtggcggtcgatgacagcaaagcgagtggcatggaaggcggggaaggcaatgatacaagcctacacgaagagaatcctacggattctgaaatcactaaagaatatcccactggcctgaagttctggctcattattctcaccatggccgccttgattatcctaggtgggcttgacaccaatattgttgctaccgctgtgcccaggtgcgaagttgaaaggcgaaggttccaatattccataagctaatcgcattttgatttctagtattaccgatgagttccacacaatggctgacgttggctggtactcatcgggatttagactcttacaagtatgaggtttagacagaaaatagtcaaactcgatttgctgagcaacctgctcttcattccagcgctgaccagccttttcattgcattttcttcagactactcagatacgcgaaacattgcctcggcgatggaggctcattccccatagtatcagaaccatcaaacgacgcttccacgactggagaatactccacaacccactcaccatttttgaacacttgtcttagaaatactgtgctatcataggttgatatgaaaccatacctcagttgaagatccaacatatatccgatgagttgcgcaaataatttggctttgcgctgggctgtcgggtactttttgaacttgtgctcattcacccagggggatttcaactcccacatagcctggatctggtcaatgtcgactgggtcggttgaaataagtgccacatcgggcgtgagggtatatccggaatagacactagcaatattggctgatttggaatctccaaatttcactgcgatgttttgagcattcaacactgatccaacaacctgacccacagattgctggaatcgcccttgaagcccgtgctcatcgccaatggcaacaaattccgcatcaacccgtctactctggaggctccatcctagcaagctcggggaccagtcttggttattctcaaattgcttcacatcttggaagaagtctggccagttgtgtaaggtcccgaggaatcttccctcatgcaatgcgcttgacgtggtgtgataagggccaatatccagcggtggcaggggctttcgtagaagggtacggcctgttatcattgccggcattttgaattgagctaatcaatcattcgttagtacggaccatacacctggaatgtagagtctagagtctatattatagacgataacatactggaaagtgtatagtgcaggaaaaaaagaaagaagagtggtgataatgtgtgggtgaaacacagtggagtgggcagaggatgttgtctgtaacaatgagggacttgttgttgttgatgtcgagagctgactgtggatatataagcttgtaagtcgttcgatggagacattcagaggagatttggaacgcgacagagaacacctttgaagtcgtttttggtttggaaaacacctatcaagggcccgatgacgaacggagattatcaaatgagtacagagtgcaactgtgagacgtgaagacagtacacgacgtagaagatgaacgagatgaaaaggtaaacaaaaggtacaaaagctaaataggcaggcaccgacttccagcgctcagcctcgacagcggccattgttgaatagcctctctgtcgagcccacaatggcagaattgccgccaaaagcagtggccaagctacacagatcatgaatggtgcattcaatgtgaaattcaaaagtattagactcaacagtaccccctattctagagcacagtaatgacattttcgaaatcagagttatggtccacaatccactagaaacagccaacaaaaaagctcatatgcatggcacaaaaatatcgatacttgtttaagcgcaccacctcggaacacaggctccgtcttcattgatcccagtatactctcaacaagcttcctatactatagctttgcatctctccttggcctcaccaatccaagcgccgacatttgacgcctatccattaaagcggccttttaccgaagagtactgttggatttcacacactctgtaacttaacttcttcaacaattcaatccatatctcacattgcaccatgcactttgacgtccaccaagtagacctctcctaacaagtacttcgggtctatatccaatgctatctagaaagcattgaagagtactaacagagagagagaagccacgtgactctcagtcactaacctgttcccattctcaaacatgagtttgttacaaatgcccaccttacgggaatagctcaagtagttcatgcagggctcagtgaggatttgatttaatcagagagtcggagttggactggtcaagcgattcttcataattagaactagcaaaatgtatccccattccttactttgtcatgagaccttcgtctaccatctccagcccttttcatcgtgataggtatcaatggaagtgatactaaggtaccattcatctgacttgctgtccgatacaaggtcaaactgcacaaagaggtagtcatcccattttgcataaccgtcttgaggccatcagggatggccattttggagaaagaaaaaagaattgtattgtttcctcaaagagaagaaaagagaagaaaagagaaaaaagagggaaataccagtaaggacatgattagaatagttgctcgggagatagttttcaacccaagtttataaggaaagagcatatcccactcactggcttggtacttactctaaagtggcaaccgcggcagacctcgtagacgcataatcaggaatctcaaccctaaccctgacctctcccacttcaccttgaaacaagaacccaatatccctcgttgaatcaaccagctccacctccctccgcacaaaccggctcttatcaagaccattgtccgttttctcaagctcagagccaatatcaaggggaagttcatcctcactatcctcattccattcaaccacggcctcatcgccaacttgtttctctacaggatcccactcgtccgtctcccagaccagccgaaacccaaacgccggtagcccgaagagccgcgacacaagcgccttgacctggtacgtatcaaacgagccaggaatctccttgacttgactcttggattcgtcatttccagttggcagacggaaagccatcttgaccagtcgcgctgctacagaccgcggatggatgactctggcgcctgaagaattcgacaaaaccgctcttgtgatagtcggctcgacgtatagctcgcacagctcactgtaccgcgggtgtgtggcgagaatggcgggttcttcttcctcggtcgtggcggagagttctttgccgatgagggataggtagtacatctctgcattggagcggtcttggggagagatggtgctgtagttcagggtggtgagggagggtgggaaccgagatagggttagcataaaagcttcgtcgacggtcattggtttggaggcttctgtgacagatggtgggaggggtggttggtcgaagaggggattggcagtgattcggagggtggttagacctgggaagacagtagggagtttgttgaggatggtccaagaggtgatattattgcgggatagatcgagagagcggagagtcggcgggaattggaagtctaggtttgtatctgtggtgttttggttgacggtgctgataccgtttccacggagggagaggtgctccaattttggaagtgcagcgaggtgtcgaagagctgatattgaggtgatttcattgtgctcgagggttaatgttgtgatagtgctagggagtggacacgttatctcagagagctggttcgcagatgccgtgagagacgtcaagtcagggaatcgatatgcaatggcagtgatctatgtccgaagtcagctttactcaatagtatctgtggtggacagggcacatacttcatcccagctaagcagggtttgttctaaatgtagctcagtaatccccttgaagatcaggtcttcctccaacgcttgaaatcggtttccgctattctccaatcagatctactattaagaatttggccagatttgagacttacttcaacctcagccgtttcaggtgcttaagctgatcgcagatatcccaaacatcgcgccaccgactcaataagcttcgactaagatcaagttcggtgatcttaggacaggtttctccaatcttttgtgctgcctcattatgtgagacttgggcttgattgtaggatgcaaggactccaacaacccgtaggccatcaagcaagacaatgcgtaactcttggagctcagcgagctgtttccgaattttgtcgaagccaacttcttcaacaaccttgccgctaatctcaattgccttgccttgaattgctgatccactagccaaagcattgtgggaaaggccatgctcggtctccgaagcatacttctcccgcagcgcttctagaaagctcagaggctggtctgaaggcctggaggggcgaacaaaagaccccgccgtgggatgtttacttttgcctggaatcacgttagcaataatgcaatacaaaagtgagatattcatacatgagaagtacctgacgcctttatgctctcctgaatgcttgcctcgacttgcgtcgtcccattcaacacctaaccagtcaccggtggtcccttgaacagtacccacatagcgaatagtacttaagtgatcatcaaatgaacgacgttgacctacaagtgagacagtcatagctcagggcagacctaacagttcatttgttcatgttttggtgagcgctacttcgtactgtgatccatgcccaaatagccagcttatgtaatcaacagcatttcacatggccagaccaggctcaacttggattgatagttgaagatcaggcgcatttcatgtaatactagataatacactgcatgtatagtaggtcaagcctagatgcagctagcaaactctttttgtaagctttttaacaagaaaaagccgataaagagtcatattgtagcatgtagaagaaggcggtgtctctatcaagaaggcggtatataaaaagaatttccggtagaaaggtgggtcgctgtagttaccgcccgcgcaaaacacctagagatagtgagcttcacccactttcttttctgcaacctaccgcatcaagatggattaccaggtacgtacacgctgacttagcccgcgcggcttcatctctttcatcaagaaagagcttatcgctgacacatcccgcagaacagagctggttccaagttcggcggcggcggcgtcgcctcccaatctgccaccaacgccgaccgacgtgagcgacttcgcagaatcgccatggagactatggatatcgagaaagatccctacatcttcaagaacaacgtgggcaccttcgaatgccgtctctgcctgacagtccaccagaacgacggctcctacctcgcccacacccagggccgcaagcaccagaccaatctggagcgacgcgctgcccgcgaggaccgggaaggcaaaaaggatcaatccaccttgcctggtgtcgccggtgttcaggtcaagaagcagctgatcaagatcggccgacctggttacaagatcaccaagatccgcgacccattgactcgccagaacggaatgttgttccagctgcagttccaggagatcactccgggcgtcaagccccgtgtgcgcttcatgtcggcctttgagcagcaggtcgagactcccgacaagaactaccagtacctggtggttgccgccgaaccctaccagaacagtgcgttcaagatccaggcgaaggagatcgatcgccgcgacgagaactactggacctggttcgacgaggacagcaaggagttctggatccagatcctgttcaagactgagcgtgaggagatcttcagcggtgttcctggtctcgcgccctcccagacctgaaattgtttttttttttcgatatcctctttgcgcgtttttttatctttatctttatctttaaccatgcgcgtcaatcaatcaatcaatcgatgaaagttcaattaacctgttgcagtctaactagttgcgtatgactatgtaggcgcttctccaatcgaagcaagaattcgaagctaaacgccgagccggtatctcccccatagatgccgatttcttatagcgcatagaacctataaagccccatgctgtagtgggggattccagtataggatgactaagcggccatatgaatgactcctagcaacgcagacaccttcagccaccttctcttcttagtagtcaccccatggtgttctcctctctagcaccctaatactcccagtgacgactctactctcacacctgtttcgcaggaaagactctcggtgcccctgctgtcccattgcagtgtcccctcttctcgctttctctttactctctcctgccccagtcctgactggtagtattgttatcttggcccgttgattggcctattcgtcgactattgctgagtttctcgcttcacagctttatcaatcgtcactggctggtacccatcgtgttccaagcctaattctatagccgcgaggcctattggttcctcgtcgtcgtcctcctcgatatccacttgttggaactgctggaggagacctgtttggcgcatgattttgaccacgtagcgggtggtctgcgggtttgatatgatcttgttatcgtccatttccttgataacaactgcccatagctgctccctcagctttatacgcgggatgatatatcctgggcattgtttaaggatatgcttcggtgtttgtgatccctcatcacagctgcaccggtctgtctctgctgccttgatgttgaataagaaatgccgaagcccgattctaaccatgcgcgtgtcggccttccagcttagagttatgacaccaatcaatggaactatcaaattatgaaatatcctacgatgaacatagtcccctcctaatttctgtgttgatattcgcctaacatacttgatgtggtcttttttgtctctttagatatccatacctgctgctggagctcgatccctccattctctactacccctatgccctccaccccatatctaatgccgggacagtccctatgccctccaccccatatctaatgccgggacagtccctatcaccgtaccaaatatgattgagaagaggataagactatcagggatggccatgatgtgaaaaaaaagaaagatttgtgattgatgtttattcaacgtgaagaaaagaaaatatttatggtaaattcgatgttgacgatggccctcctacctcgccaacacgccttcatggtcctcgcgcggcgcgtcgctccagattcgtctggtgctttcgaccctgggtgtccaggtccaaaagcaactcatcaagactggctgacccggatacaaaatcaccaaaacccgcgacgaattagcccgtggaggcgttgacggaagagttcaagctagcttagatgaatggtaaatcttcgtccttttgtggctgttgcgcgtactgccagttcgttcggcatggcaataagcccacttgctttgagaacgcgtccaatacatgcagaacgatgatgatgctaattgtaatggtgtatgtgagaagaagagaagagaggaagatagaagagccaatacatagtctgcgtagtttccatgattggagggagtagttgctcagggggatggtcaagacatctgaagagacatgtaaagagatcgggactaggggtttctgtcgacttcacatatgtatatactatccttaccttatgcttattatatagttatatagcactgacgatgaactcacccttctccgcagggtcagtgactagtcattgtcaagtaaagctaagatgagcttaaatgtaactatactacatacttatctttagtctaaacattataccgctactatcttttaagctaagttatatgtgaagcaaagcggaaaacgcagtactacttgtcccctttccatgatagaggattaaaagtcggatcaacaccaaatcgtggttgtaggtatgcggtatgccacccacggtcagactagctcgggggatctagtcttaggacaggtagcttaattgaatatgtttgatgtttgctagtttacagaagtggccagctatataaagcaggccatcgtctgtgatctggaacgactgatggatggatatgatcgacccggttcgccgactcgcaggcttctgaaaccagtcatagcattgggcaacaaagtcattgtatacggctgaggcactaacgtccaatgtagtcttctctgttttagagactcaaaacgcattcgactgtgaaccggccaagtatatgaaaaaatagtgcattgcaagaagggcagacatagtcagaaaagacgagtgcattttatttttagggtaatatcctgactatcctaaatcagctgggtctatccgaagatgtgacaagtagtgtcgtcttgaaagggatgcaaggcgttagatacatatgtatcaacaagtgaaaccgaagatgggtcataattcgggaaaacaacatcgcgctgatatgctcaatgagaatgagtaacgaggtgaaaacaaagccgagtttttttctgaccgacaaaagagtaccattgagaaacaaaggatgcaagccctgcatgcttcccttgtccccgggaatcgtttcgatcagtctcggaacacaacaaacaataaacctaagtggtttcgaaggcattgaatgccttataggtgtagccgatgaatggcaaactcatctcggcttcctgtgagtccggcatggcacgggcctgggcgcggtggatcgcgctagtgtcctcctgaggaatctcatcaatcgggaagtacgacacatcaatgttcgagctgagacgcggctcgaagggagcacggatgctgcgcagttgatcccaaacaacacccctgaagaaggggtggcttttgatctgtgtcgcgcctccgtgctgaccaccttcgctgccaatacggtgatccgggtcacacaagaaactagacaattcagttagcggatgatcctgttgaatttggatgcatagataaaagcccaccttcggatcagcgcctcggagtcacggccaagaaccagttcatccgggaagtacaagcactctctccagttcacgattttccggtaagtgtcatttgtgtcttcagcacagaacggaggccagcccacgagacattcaaacatgatggcaccaacagaccaccaatcgcagagataagtgtagccttgaccgttgaaaatctcaggagcaatataatcaggagttccgacagtcgaataggccatggcacgacgtgactttcgccaggtattgatctgaccacggttggacactgtcaggttgatggcatcattgaagtatccagagttgcggttccgatccttggaggtagagttcttgaggaggttttggtagtaagcgttgtcatgagtcttcttgcctccggttgacagaccgaagtcagtaagcttgacgtgtccaccgcgatcaagcaagatgttgtcaggtttgatatcactgccaaagaaacattcattagtatggattgtcttgtatgttggcgtgtgcacttgattcttcatcggagagagagagagaaaaatgcatattgccaatgtccaactcgcgaccaaaaggcacttaccgatggaggaaaccaagcttgtgtacggcttcaattgccatcacgacctcggccatgtagaaccgtgtaatgtcctcagagaagatctcgtacttgatcaacatggtcatcaaatcaccaccaggcaaaaactccatcagtaggtaaaggtacgcagcatcctggaacgatgcgtgaagcttcacaagccaagggttgtcctttgaatcagccagaatatcacgctcggcacggacgtgggctaattgatccttcttgaacatttcggtcttgatcaacgacttgagggcgtaaatcttgccatcagtcttgcgctgcaccagcttgacctcaccgaaagcaccctttccgataatcttgatggtctggaagtttgccggtgtctcctttgtgcgcaggaaccgaaggaaatcggactctcgcttggaaatcacgtcggcatcctgtcgcttcttttcgatggggatattggggtcacggagggttttatcgagttccgccgatctataggggcgaacatcatagataagtcacaactcggaaacaatatttcaaggattccattggggacatggatacttaccgcatgttacggtcacgggcccgttcaatattctcgtggaagaacacagtcaccaactcctttgctgccttgcctcgcttgtgggcgttctcggagtaccgatcggggaagcgctgcaactcttcgctctcggggggtgggcgagggctgcgaggcaccggggggatcaggtgtgatgcttgggcctgtgtttgagccggggagccaccagcggtgcggggccgctgggctggggaaccagcccgattattgaaaaaccctgcacggtttgagttaagatcctgattagagaattgctggatcagaccgttggtgccgtcagggtagcccgggcgcgcttggtaggcgggctggggagattgcaacgcttgctgttgcgcgtactgctgttgctgttgctgctgttgctgggcatactgcggctgtacctgttggggtgggtaattgttgggcaggaaataacccggggcgtaagcgggattggaggggtcgacgtattcctgggccccctgagtctgatagatgggctgggggaaggcggagggggtagtgggataggcgcggttgttggcattgtagttacggtcatagccgtaattcatattgttgcggttgttattgttgggatccatcttgactcgaactcccaagggacttttcaagggtgatgggggagaagaaagttgagaggaagggagttgaggacgagggcggggagtttaaagaagcggtggctcaggtgctcaggaggcaatctagccccagcgtaactggttgacttgttgtttacatgttacatctttctaccacacgattacctgaaacagctgtgttcgaaatgtctttgatacttttcttttcatctaatgatttaccagaagcaagcgaaatagtctgagggagggaattaccagtgtgccaataagctgatatcgatgttttgaaagaggacaatatgttttacatgcatactttgcacgtagcacctatgttgtagtaaacaacggctctccgggagaatccctggaatatcccgaggtcactggcatccagggcgttgtgtatattgtacagcttttttcgcaacttcttggttttctctttccaatttgggaactcagctcttgccgcttttggaggagcccctggatgtattacataagtacaccacgtgatctcggcctaaaataacttctgctccgcatacgaaccaaacctcagaaagaaacggatcctgaccattcttttcactgcataacgagaacttacctattaactacgggaaatagaactacggaaaagagtgtcttctattatttcaacaaagcatatagccgacagaacctatatctcaaggacaccatcgaatcggacgtccttataccgtgctatatactaaacccattcggtggtgtccttgagattctatgcttcgttgactttatagaagttacctgcaagcatacttgataggtaagctctcgttgtggggtcaagggaatggtcaggatccgtttctgatacctcggatcgcagccaagcctatcccccatctcgagatcttggctacgtaggccgttataggttcaggggatcatcagaatcttgcgcgtagtcgatcctagtatgatatctctggacggctggccggtacccacgtccattagctgttatggacgtagcgtggtcatttcatctcgatatcacgtgaagttttgttctacatcccaggaggtaaaggaactaactacagaaaagcaaaattccgagtgacagacattaatcggtcaatatgtacacaagacagatggaatcatatcattataatcccacatgttcggggcggaagaaaaggccaaaacgccgtagtgctttgcgcgctcactgcccagtcccctaaacccccaatagaaacaaaaagaaagaaatggtgaacaggcagagaattgagatcgtatcatcggaacagaagaaaacataacgcctgaccatgatgcttttgttttgtcgaccgcaaaagaacaagatgaaaaccccgtgaggacgcaggatcgagaggatggtgtaatggtccttggttaggaactcattatgcaaggagtaatgaaagagtatgaggggcaatggagacgctcgaaagcggtgttagtcacaatggagtggattacccgcgagcaacccaccatgaacggactgccatgcagcaaatccgcttgtagacttgtgttgtgcccttgccctcggcttcttcttcgaggaacttctgtgcgacgaagagcctggttcctgcctctttctcggtggtgtagcccaccttgggcaggctgttggggaagtcagcccagcgctgtcctaggtgacgtgcgacagagatggagtagatgatgtcccgattttcgtatgtgtctagcaattgtcgacaccgactgagggtgtcgtcgatctgtttggccgagcttgcttcgttgtcataaagtgtgaggaattccccgacttggtcccagaaatccaattggcggctctggaactgatccggagagttcggggggttggcggcatccatgaccagctcccgcgacaatgggtttgagtccaggtggttccaagtaagcaatgcttcaaccacgtttaaccgtgcgcaagacacacagagattccagtcccgcccctgttgtccagtctctccgtccggtaccttgcgacacaacgacatgcttttccagataatcgaagcctcgaaactctctagacgagcaagggtttcaccgtcttgaagatcccattcgttgaacgcgatgatcaaagccgaataatccgccataagctgggcatcggccatgagtaatgagagagcattttcggaataccagcgaacctcaagaagcttgtcgatcgcaggtgcatatgtggccaggaaaactgcttggatctcttcgaggcggcctggtggaagagttgcgacagggtgagggggaggaggagcaattcccctcaaagagaataggtcattgacatagagatttttggctgtggagtggattgttagctacccgtgcataatgctgcaatatgcagatgaagaaacaaattatatgaactcacctttatatgaaggctctgagccctgttgccgtggtacgccagtgttctgcatttctgtatgattggattgatggttcgttgccaaagaagaatcgatggaagctctgtgctcgtgttggtcggtagaggcagtgggcgattcggattgaagggaaggagcaaatggttgagacgaagcgggcatgtacccgggaggagcagaaggatatgaagggtatgaaggtgctgatgaattagaatgtccttgaggattgacaatcagcgaaggaggagggttaggagctggttgaatagctgaaggtgtagatgcttgagtccgaaacacaggatcgtagcccaaacattcacgtttgcttttcacacaatttctgcagaccggatgtgcttcgtcacactaaaatcgagttagacgtgaaaatggccaaatatccaaaaagccgataaaaaaaaaagaagttggagattgagagggaggtggatttaaggcaaaataaatggcggggtctggcgggcacaagcgagcgactccgccccgcgaaaactacatttgcgctcaccttgattcttcgtttgcgacaggttaaacaaccggtttttgtgcgtcgcttgacttctttcttgtgtctattgcctgataacatcttgttcgggtcccccgggagttgatatcgcatttgcgcattccccatattggagggatagcccgtcatgtattgtcccatggaagccatcggaggcatattgtttgggagcggcgatccaatcggtgcctgtggcacctgtccttgggatccggaattgtgatacatgtcgttttgataatgttgcggctgtgtctgaaactggtgggtatgcgcctgtggtgattgatggcttcctggttgttgggattgagcgggactatgcgaatattggtatgaaccgttggttgaatgaaagtgagatgtcccattcacagccccattgtcgtgcccacccgtagagtccgccatgcccgcgttcgaatcatgatggtccaaatgactactgtcgccgaaatcatggccatccattgttgggatatcatcagttccaatcgctggtaaggaatggtcgagggaaatcgcaggaagtgacatgtcgggaggtgcagatgaacctattgaaggcaaggcatcaaaggactgcaattccgaatcatcgaagccatttgatgtgtccatgggtggaagtgatggatcaatcgctggaagtgatgattccacagacggtaaagtcacatctggaccttgtgcttgctgggtagcttctggtggctgatacgtgctggcatcctgtggtgggcctgcggcggacgaatttggtgctgctggcacttctggtgttgctgatacttctggtatttgtggtacttccggtggcagcacctctggcactgctgattcaactggtggttctggtggctctgacggtgttggttgggctgattgagctggttcagctggttgagttggcgccaccggttcttgacttgtttccacaatgggttgattcgtttccgctggtaaaggctcattctgggataagggttgttctgtctcaacagctggcgcattcggttcggtcgcaggattggtggattcgccaggcggggcgctcgagtccgtcggctccgccatactggaattcacagcctcccaatgaaagtctcgatcggaggggagaattggtagatattttgcaagtaggcttcggagacaaggtcttgagtaaaggagtagtcgagtaggcaaggtcaaaggtcgtctggtttgtggctgagcgaagaaatcacaccaggtcgaacggatggggagttagaaatcatttattccctatgatctgtggggtccagcatttgttagtcaaaatattcggccagcattatcgtcagtgtcccgtatcggagagtgatagagtcctcgatgtcgatcatcaacatcgccaggaaagaagcactatgctagcgcaggccctccatttccacgtctttaaatccaatcggcggatgaaccatgtgcaggatatgtactgagcgcaaggactgtgcatttgtacgaatgtccatatgatatagagacctcatggcgtgtccagatatcctgctagtcaatcgaggttttgtaggtcgcattcgcggtggccgaccagcctcaaatgtaaccatctgtcaacaactcccacggggtctcggaaaagcatcgcgaggtagaatctagcactcaatgacctcatttgacagcaggaatactggacatcgtatcgcacggggtgaggctccggcgcgagacggtgcgcattggtcgagggattggcagggcctgcggggatcgcgacttgctcgaatttcaaagacttaccaggtagatagatttttaagataagatcgacagaagcacaaatcgcggggagactatgcagatgcgagggtcgcgggtcaagaaaagcgcgaaagagagaggctaaaggagctttcctttccggcgttgaaactctccgctttgattgtgaaggaaaaaaaattatagtggcaaacaccgctttctaccccaacattgcatattccgaagtttgatatctgtgttttcacattatttacgttatttacacttgttttatttgttttgtgaatgctttgctgatactgttgtcttatttggacttcgattaacatagggtcgaattaatagtgtcgcatacagcccttctagtctagatccatggaccatccatgaaagctatagattgtcctgggaagaggcgctggcataagtcagcctctacatggtcaaaggtccgcttcaaacgtgcacgtgtgccaatgaataggacgcgtttgaagataggcattcaacacagaagccttaagcttgcaaatgatcctatgggtgaatgggttcgaagtgtacattctggggagcaatattctgccacgagtcttttgctgaagaatgtggtacatctctgatattgcttggcgcagtggaagtcgtgcattgtgtgcctgttgcttgaagccacatagttgcagacttggagactcgtggggtcatgggccaatggatagaagtcggatgtagaaagacccgaggggttaggattctcaagggtatgggcttgcatttaaatttgagccacgacaaataagttttgcggatatcacatcctctgaaggtggcactatttcctcattgccttcggcttgcgcttcttgaagacgacaccaggcgtagcatcttcactctgcggcttctcttcaaaaactggctctactgaagattgagcgggctcttcagtcttgatctcacttgactcattcgtctcttgcgcctctggcttgaaagaatcatcttctgtctttgcagtgagggtaggttgttcagtagctgtctcttgctcatcaagctcgactttcggaatgaaggttttcgtcctcttaatatcttttgtggatgcaatcaagtcatccaagccctcgtcctcttgtgcaccagggtattgcctcatcctcgagccccaacctttgttgataataggttcaggcgcgtgctcatcctcctcctcatcgccttcaagtttgcgcttgcgtattccaactgactttgtggggccttctaatccttgctggacctcgatccttgtctcagatgtcgtctgccaatcccctgctaaggccatatcagcgcggaattcctcggggacggcgacacccattgccacgagctgtgccatctgtttctttcgttcttctagggaagcaggtcgggctgtggatttaggggctggcggtgggtttcctttcgcgctgtctttgtcggtggaggacccgccactgacagcctgtcgcaatcgttcgacttcggttttcgcgcgttgtgaatctctttgtttttgttcattgtcattgtgtatttgtctaaggaagcgcttgagattgccttgatgttttgggctggcttcgtgttgggtcttttcgaagggcgtgtcacggatgaagaccttgcactgtttgcaccagtagcgcggctgtgaaatagtcagcagggttctagacaggtaaatttcacacttactgctgatttccagaattcagacatgccggagtactgagttggaataagaggaggtgaattatcgagactttgatcgcattgatattgcccggcagaaagctacgtagttaccccactccgttggccaattaaccggaacttcccttcaccacctaggaacatagctctataccgagtactccgtatatatttgtactatttggactacctccacttctatgggactaagcagatcttagcaaaggatgctcaggtcagtgacatgtgcatattactaagttgtccctaagaactcgggaaattgtcatattaagtcttataagagctatcaatcttccgaaccaagaatttccagttcggtaactaattacaaaatcggcagtcctgctcgagattatagtatatctgcaaagcagaaaggttctgtatagtagagagaaagaaggacgaccaaacaggcaaagaggacgacgacgtattatcgggtttataagtaaacagcaaagagagagagagagagagattgatagaagggttcatttctgaaaacacattttcatgacaatttgggatcatgctagatcaaagcataggtttatgggtgctgtggcaaggtgcaggcgtgattcaatccagttccgctgtcgagacgcccaaagcccaaggtccatcatcatagatcgtagaacgacgaacatccctcgcagtcatcgtcgcggtatatgggttggcacgatgcatcgattggctatgaaaatcagtaaagaataatataagacgggtgagacttaccgattatcccaccagaccatatcacccccagacaaccactccatgctgaagacatactgctctagttagccctggattttaacagaatacggctgacttaaactcacttttgattgtgtacagtgtttaatcaactcccaaatcagcctttggctctcttcaatatcctttccaacgatccgtttggcatgcgccgccagatacaatgttttccgcccgtctggtgctgtttgtacgagacggtggtaggccggtggtttggctgccagttcgtggggaaggggatttccaaacacagttggtgccgcgagctttcgggaatgccagagacttaatgaagttagcttcagacacggggagatttcgaaacagctggcttactcgtgctcgacaacgaggttctcaatctcgtcctttttcgcttgagatagatcaccgtacgcacgacgtgtgtctgcaaaatgggtccatgatccgcctgcgactgggtttccatgagaaagcagtatggaatacttggaccgatgttggtgatatgtggagtcctagattgggttagtacccatgtggctttttggggacgatgatgattacagtgtgccatagcgcattgcccagactgtggtagtacctgcgactatccatcttcaccagagagccatcctgctcgatgctattctcatcagaatgtgatatatatttaagtttgcatgtggaatactcacttggcaacgtcgaagagtaacggttcacctaatcggtcattttcacgtccgtaaaagaacggattgatttctagtttgtcacccaattgttgcgagaaagcaatgtgccgaatattgtctagctccgtctttcgaaagatcagtactgcatacttgtcttgcaaagcgatcaactagcatcttgtcagtggtttcttccaacctctcaaatattaactcacttgcgcgacgacgtcatctgatacaggtttgctccagtcaacgccgtatacttcggcaccaaagaatgaatcttccgagtggagtattgggtggatagacaatgtgccttcttggatcgtttcttgagcacctgtccgagaaggacatgtgttatcgtacaccaagatgtgcatatcgtccaccaagctatgcatatcgtcagacattgaattgcgaagtgagttgtgtgatctcttgatttgagaggcactcctcgtttttgatatctccagataaacccgcacgcggcttcaagcccgcgcggcccgaccccgaagatgccgatgcaagagctacggccactcaaataggatagcatttcctacctgtgagaaaagctaataattttacttcttctcatatcaccataatgacctccatcctaataaaagccggtccataccggttccgtgcgaggttcgaatcgtcagctcccaaaacagtggccctcttccgcactctcctcccataccgccagaaactcatccatgttcgttggagcggggagggtatgtggatcccattaggagaaactgatttcggactaccgtttgagaaccatacggctcacccttctgcgggtcaaattctgttgtatcctggtggtatctccgaaaccgagattctgttctgttatggaggtgttgcctttgcaagtaagatgggaccgctggcggcaaatcatttcttgactatcgttgagggaattgaaaacctaaaggcactgggtgagctggtgctttgggagggagcgcaagatattttgttcgagttggatgatgctgataggtaagtctgttctattgtatagactacgacctcctctcaatactaattatgtatccaaattctcgtataggccttgttctgcaaagctatgatattctactatcagtcatgaaagcatcccgtccatattcaactctgggaaatcaagcgactccccgaaaagattccctgcccagtcaacaccagaatcattcatcaaatctagcagagactggattgccatatcatcaatctccgtttcctcgatatgctgctcgttcttctcagagattaacaccaaagcaactgtatagtgaacaatggcttggaagtcgtgcgcaaaatggaatctcgtggccagagacacgctgtcgaagatgtctatcgcaaggaggaggagtcgagcgagaaccgaagaagaagaggagggaaggcgtgtacataatttccctttctcttgactagagtcttcgctgcaaatttgtaggttttctgtttctcatgttgtcagttattgatggactcagatcataaaatatctatatgaatacctcaccatcgatgatgccccgaatatagcaaagacataagaatatgatagcgaacgtatgcgaaatccaggtcgagtccaccgcatagtataatcgactcacggatgcacgatccacattgtatgtcccaccgggaaaggtagatagttcctgcgaatccagcgagaagacaatatctggcttgaagctcgattgtgctaatattatctgcgctgctgcggtcaagctcactgaaagcgcttgttgaacatgtggtttacttaaatccgtcgatcgatgtacccgtggggaagaaagtagtggtgcaagggatgcacaattgagggagagtcggtaccactacatcgcaggttagattaagttcctgaataaatgtagttaggtaactgcatacccgggccgaagtgaatggcaaatgattgtaatgggattctgatttctctgatgattgttaattactgtgaggataggatgccaaatgaacgcacctaaacgagaaaaccaagatctgcgaaccgtcagtaagaccaaaaataactccaggaagattcacttgcctctcccaatcatctaaatcactattcaaccgttgcaagcaactcggttgcaatcgacggccagatatatccccagaactagacatagcaaggtgaactattccgacaagttccacaagtccccttacccgaaggtccgcaggggactgcatcagctcatgagagacaaacctccacgccacctgaaccgatggagtaggatcaattgatgcgggtagaccggatgtaagcatgaggttgaagttgcatgtgagcaagttgtaccacactcgtagctttttcacatcctctatggatggtaccttgtcagggggtttgaatagtgatgtggctgattgttcgaggcccagtagggcagagtatcgctctgctaatcccaagacaacccaagcactgatttcgttgtaccggcttttggtctggggttcgtcataggtacttgggcgcaaggaatcctcatcttcaccctctttgctgcatggcatccactgggcatagagaagaagcacacagatagaatctaaattgacatctgatggggtaggccggagtaggagcctggagaccgctttgtcgagtaattttgtcagatcataaaatcggggatgaccgacaatagaatcgtcactgcacacgagtattattagcctagcttttgggtctagaaattttcgctcacgttcgatcacctatatcccagaaccgggtaccaactgagcatattgtcaaaataagtgttgggcttgtttgaagatattcatgccatgtatcccgaataccttcatctaatacaggcgctgagtgatggcaatgatcaaagaatctgctgaatatcagtaggtggcatatttcccagatggagttgtagaatacatttcaactgctcgccggacctcttcggctgtaaggagcccctggtaaataggatcgtacatgttcttgtatctctgcgctctcagagttgactcatcaactctctcttccgcaagcactcttaacgatcgcagtgttgcgataggaggacctagatggattccgtcgatttctgactcgggagaatcatatatgttgctttgacttttcgggagagcttcttgatgctcaggctgaatgtctctgggtctttcttttgtattgtggtcaaatggactcttctgattttcaagctcagatattcgggtttcatgttggttgagtctgcttctggtcttagtgtctgctcttgactgggtcgcaattttcagtctcacctattttgaagttcaataaccagttgtactagacccgatggactttgagtcaggtccaatgttggtgctctatctgtctcaaatgaacaagtgatgcttagtctttgacatcgcttgcatggtaattgtagattggatacgtcggatggtaaacatcgctgttttcgtgtgtgacactaaagcgcctatattaagtactgcgtttctatgttgaacacgcaatactcacttgtagacaagcccgggcaatccgacgcactttagcagggcgctcattatctgtttgattgtctgaccaattggcattgaaggacattgctgtttggtgtttgaacaagaagaagacacatcttagagaatcagatcagaaaaagggccaatctggggatatttactctgataacatctcggacgctgatttgctgccgataccctcagtgttgaggctttcatgaaagtcttatttatgggcctcgcggcttatttgacactttaaccttaacagaagtgcctgtattcgagttaattgtgtattccgctgggattcgcagagtacgtactcagcatatataatctcagctcctgccaactcatcctctgtgaatgcattggcaagagattgggtttttccatctttgaccccgatacaacatttgctttaattcgttagcgaccgtgagtctgtcaaatcaccaaaagccccgtggctgatgtcgctggcagtcacaactgtcgcattaatcacaaccaaatcaaatttaggccatactctcaatagtgtcagttaaaatttgggtgtcgcattggcatagtaaggcacaacatgcggcacgcacggctttctagccgactccatcggcttgtgccgcttatctggccacaacgttgtttgagatataggattctatcgctatcatttgattacgaacaatatcccgataactatcgcgttgctaaatttccttatcgtcccacaagacacgttgtgctaggtttggtaggccttacggagtatagttcggagaaactcgatacagggcccactacaacttggggagagagacagagacaatacattcaaattgaaagaagcagattgacaatgtatatagcaataaaataaggttgtcctgttaaacacacagagtcgacgcgagagaattatgatttagattctgtcggaaatcttctgccacagattctgggcagtttcctaggccaacgattaattatatgaaaggtttgggttaagatgggactaaccttctcgataacctcgctcgaagagccggtgacaaagtccatctctgcataatcgaccatctttgacttggtccagaacttgtatccaaagaagaggacggcaaagaacggaattggaaagtaagtagtaacaaaagaggaagcgtcaaagctcggcactttgaaggagatcagtaagtggaagaggtgcttcatatcttgcgaactcactgaaggaaccaaacccgccgaagatgatgaccataacgcaaattgaaattccatctaaatcgtcacatatattagtatctccgcacgaaatagagaatttggaagctgacagtatgaaagatatggttgaagaggtgccatatatgggagtgtctttcgatcgatgccctgcgccttgagacctttgttccaacggatgctggtccacaagatccctgtccaggagatcataccacacatcgcagtcatgttagagactttattgatgttagcttcatagcctagcacggatttcctcaagatgtccactcacaatagccaaacactgtgcccgcttctccatgggcggcggccataaatgagaggaaagagaaagcaccacagaaaagaaagcagacccaggggaacccatctgctcgagttttgagaaagatctttggggcatgtccacgggttgctagtccgtatagggttcttgatgagacaaaaagatcagctgtaccggcagaccatgcgctggtgagaagggctgcattaataatggaggggaggaccgagatcccggagttctatatatgttagcttttcagccctgggtaagggtttgcacggtgaattacctggatagcgataacaaagggactcttggctgcagtagaagtaagattgagagaagggtcggagggagacacgagaagtccgatctgggattgtaagtagactgcaagtaatcgttgggttttgaaacttaccaagaaagcactgcagatatagactggattgaagagaagggaagttagtgaattgacgtctgggaaacaaaatagctgagctcacagagtacaagcctaatccaaacactcttgatggctcgcggcacattctttcgtggctgtaatatgatgtaagtgagaggaactcgcgatcgggttgacaaactctcacgtttgaagtctcagcagctgcaattgccgtaatctcagatccaatgaatgcgaatgcagcattgatcaaaactataaaccgatgagttattcggtacgagctgatagttcgaaactggtctcaccgctgaaaaatccgaggaagcgtcctttcgaaccggctttattgaatgttagataccagtaagtgggtattgaattgatcgacttaccaattccttcatactgtacgaatccaccagtctcgttccaatatttgaatccgattgcctcgtggttaggtccgccaccggcactaatgataataccagtaataataaggccaatgatagtcacaacctatatcaaatgtcagttctctccatttttgaggctgcgctctttttatcttaccttgattgaacaaaaccagaattccatctcaccaaagactcgtgttcccgcatagtttatggcaaactagatgatcatcagtatcatttgtagtccaattctttgcacaaaagcataccacgacgatcagcatcagcccaacccacatggcattattacagattccagtagagcatgtagaatctgtctgtccggccggagtccaaaatgtgaccagaagagccgcagcggaaatttcagccggtaagacaactggagaaatcagttagatgcatcctgctttcccagaataaacaagaatagtcgtaccaatataactaaagcatttgtcaggccaggttctcatggttcagaatacaacttcacttacttataccagaacaggatacccatagcaaatccaagctcgggcgaggtgaaccggccagccaaagcgaattgaccgccaggaatgggaaattgcgatgccatctcaccgagagcaacctgcggatggtcgtcagtctttttgggagatttgaaagcgtcggcagttgccttaccattactgagtacagcaacgaagccataatacagtatccaataagaagaccggctggaccaccatgctggagatcgctcgctgtgcctagaaagaggccagtaccctagggaatcatcagcatgaaagtgaattgagctgacagtaggacggatgactgacgataacacctccgatggcaatcatttgtctatatcgaatcgtgagtccctatatatcaagtcccgcgtgtggcacttacagatgccgtggctatactaagttttagttcatccctgttgccatcaaaaaggtgtggctcgacgtaccctgagctgtcgttggagaccatgattgctacctatgtcttgggtagttcccatgctgactgggacttcgttggcatcataagccatttctttagttttctgaaatgtaggttaatataaaaaccatggatcttactcccaaaggaggtatatctcacgtcgtgctgcatattgttccacctagctggttgtcgatgaatgaattactttcgttggaaaaggattggatgatcctatatacatatgtgattatcaacgccatctacaaaaacgccacatgaaggttaaatcaaacttatcttcgagataaggctcttacacggttcatcaccgtggcgtgcgggtcgaaccgagatttcccgcgcctgtcttatcagcgggtagagaccgatgctcccgacgctcaccctcctcaaaggtacgagggatcgtcaaagattgaatgtttgaaccaatctgaaaatctggaatttgactttgtggcgactattcaagtgattgctatctcaaaatggcatattctacacggcctctacggccgggagtatacgtgccactgcccacgttctttgatgaacaccaagaaattgactatgacagctatcggagacatctgctaggtaagatagggctcttattgaaaattaccaatgacatgaacttatctgacaccgatcacagctatggtcactcgcggcatgggtaagttgtttgagcgtgtattatgaaaccacatattaatgggactccgcgttcagtaccagtatgtgctggatcgttaggggaggctgttcacctggtgagtttggttctttcctatcatgcctttagatagtactgatggtcttaggatttcgatgagcgtgtatcccttatccgcttcatcagggaaactctggatggggcaggattgcaatctacccccatagtcgctggtgtaggaggactcagtaccagagaaactatcagtctctccaaagctgctgccgatgccggggcgtaagtgaatactgaattccggcgattatcttccttctaacaatgacagagatgcgggtatggttattttacctgcctattatgccgcgagtctgaacacagacatggaccaagtcattcaatactatgtggatatttgcgaagcatcgccagtatgggttgtccataacgcactaactgcatcattgctaatgaagtgatagattcctctgttgctatacaacttcccatccaacgctggcggccaggatatgtcttcagaagttatcagcgcgatcatgaagaaaacatctaacttatgtggagtgaagttgacgtgagtcttagccttcttggcaactctcattttgacagcgctgataagaacagatgcggtggaagcatggggaagctgatccgtcttcaagccctgatctccgaagataccacaataaatgagactcgcaaattcccatttcttttactggacggccttattgctgatctaaccccctggatgcaatgtgctggtcatggcactgtgagcggtattcctaactttgtgccagtggcttctatgaggctctggtcactactgaacttgccatccccaacagagacagaacgcaatgaagcgagaaatattcaagcgattcttgcgcgggctgatgctgctgcggttccaggtggtattcgggctatgagtgagtatatccataaagaatttcgagggtactaggctgattacatgtagaatatgcattgaacaagatgcatgggtatgggattgctccgcgaagaccattgcttccgttgggggaagctgaagggggcgagtttatgaatgctttgggtgaggcaatgcgacttgagtctgaattaagagaggcaacgtcaactccatagcatggtagtctgttatcgcgactatgttggaccaagtgtcctttcttacttcacctttcctacggtcgttgatactctttgtatatgtagccaatcaatatctatcggagtattatggagtatactaaacgttgtaattcttattcatatcatactaaaagtacgaaagaagcaggacgaaataaacaaccaggtaatacaagcaaagttcttttagtcccgggaattagcaacgtctactcactttctagctagctacactattgataataggaccaccatctatccatacatactaattttcatcagttatcaagtttcggttaattagagctttaaatccaagggtcattcttagatacaatgcactatgctatggacgatcaaaataactttgccccaaactcttcaaaagcctgtcttcaaaggtccgcctgttccggaactgggctctttagttttccaacttcaagagccatacggatgttctcaattgtccattcttctatggcaagaattgtcttttggcaagtcagtctcacaccactacttatggggaaatacaaaactcacctcactagtccaagtgcccatatggggaaccagaatcacattctggttactgagcaacccaggatgaatccgaggctcttcctcaaagacgtcgaggccagccgagaacactttaccactatctagggcatcaaccagagcagcctcgtccatgacagcgccgcgggcagtgttgaccactaccacgccgtccttcatcttagcgaactcagctttgccgataatatggcgcgtgtttttcttcaagcgattagtatcataccacatctgcttcccttttggaacaagaaatcacttacattcaatggcaggttcaagctgatcacgtcactggtggacaggagttcatcaaaagaaacatatttcgcacccgctgacatctcatcactgagtctgcggcggttatgatagatgaccttcatcccaaaggcctctgcctttttcttcaaattacgtccaataccacccattcccagaatcccaaggacctttccctggggatcatggccgagaggaggcgccgggtggccacgccatttaccctcgcgcaaggcgttcatgccggtgttgaagttgcgcaatgcaccaagaatcaggaacatgttcacgtcggcagtggcatcgtccactgcagttgggacattggaaaccagaatcggggggttgcgcgcactgcaggcatgaacgtccacttggtcatatccggctcctatagatattgcatgtcaacatatacatatttgagcactcatatcataagctcaacgtaccacaatgcgcgatatatcggagtgagcttggtagcacattcactagctcctcgtctacaagccctgtttgactcaaagaccccattgttcggtatatcgcaacaacaccatccagcttgccgtctttgcactcttggatgaactcggctcgggtggtcgccgctgactcaactagctgtgctacctctcccaatgcattccaggctgcctgtgcactgtgtttgaagaatgtcaatttcatgaaatggatatcaatggtgcgaaaggatggggtgaacgtactagtcgatacttccaagacgtaggaccttgggcttggggccagtagaacccattccgatggtattaagggcagttgattctgtgttgatccagacaattagcaatttgagcagacgaggaatgtatagcaatgctagaacattaactctgagtcaatttttcaaagattttccctccagttttacttcgggtcgaaataccccgacgccttttcttgacatatttgaacttaccgataagcaagcagtccgatcaagatgataagtgacttagttgttgcaaaagaggtttgaagacacaaatgaagtcaaaggaacaagagacagagatattagacaataagagtcataactatatatattttactaagcatcggccgagaagcaaagcaagtgccctcaactgcggaatacctaaccgacgtcagccatcggctcgattgccgatgtcgttatctgttgacacactaaaatgctggccatgagtggtgcttttattctagtccactgtgatattgtgtggaatagaaaacatttcgagaacattggagacttcgtgttttcaactttgaaatggaactcgcgacggttcgagtaaatgtattcagccagatgtgtactatacagtgcgtcaaggggctatttccaggctcactagccttcaattagaatacgagtccagtcaaacttcttccagcgctttctgaatccgtcaaccctgcgatctccacggttccagcgtccttgtcgtttgataacgtccggtgcaacatccagcattccaccgatgatctctcgggcaaagagatctccacgaggccagcggttgtcgtcctccacaatatgacccaggccaccatctagttcaaaccaaacgtggaagtagggcatctccttcacaagggttcggcggaaggcagaccggcctaacccttgctttgatttagcaagggtatcgataagtttgcggtgctgcgaccattccgactcggcactgagaattgcctctttgaaaaacgcaggagcggtttctcctagactgtagggtaaaggcacgacttccatggatgcatgtcgcttgcgctgtggctgggctgcattctcgtagaagatcacatctcgaccttggtcgtggtacatacgcgtgagactcttcataaagttgcggatctcttcccactcgtcgtcatcgcattccatcaaattagtgcgatgttggattggtacgatagtagcacccccttcactgatttcgggttcggtaggaagtgtgaggaagaccctggtcgcaagggaaaccactggggcaagaggaggcgtgcccttgtcttcgttgtgacaaagcgggcagttgtccaatatccggttcatcttgtggaagtcattgatcgttgtgttcttgaggtcaatctcagatcgatgaacccttttggccaacttggacgcattgtcatccatatactccaagtcgttctatacattggttagcaggggaaacaggagtcatcacacataagtctaggactgacctcaaacttggcatcacggccaatttgatctgctaagcggcggccttctccgccgagttggccacgggtcttgcgctcttcgcgcaccatatcttcaatggtcatatcttcatttgcttccacctggcctctttcccggcctctcttagtatcgacagctttgacctcattcctagagcctgctagcatcgggttatgcataacatcaaggaccacaacatcggactccttgcggtttgacatagctgccgcggctgtattgtactgttcctcgagatcggcggcatttggtgcttttctgagctttgccttcatcatctgggctttgagacgattcagtgccgtcatatcgaggtgacgggtagtgttcggaggaggcacagtgtccattttcttgccttggccttcggccttcagttcctgctctggatcacgaacatgttcgagtggacctcttcgaatatcattttggagtttcctttcctggaacagctcgccactaggtttatctttgcccacataggacttgccatacgttttgcgccgatcaatctcagtttcctcctcccgagcgtcgtcaaaggagcgaaggtctccaaaacgctcagtagcaatatcttcaataggcctgccactttcctccgcctctctgtatacacctttgagtttggtcattctccattgtgaccccgaatccccaaaagtatagtccacctcgtgctgagcaggttcatcttctatatcttcgagtgtttttccatctttgagatcacgaagatggtcgttgagctccttgtcatgaatcttgagttcgtagtccgccgaaagcattattggtttcggctcctcctgtcgcgtcgaatccggtcgatgaacatattcaacgtcgagacccgagggcgcttccatccaggcgtcccgtttgagattactgggctcttcctgtactattaccggaggagcggtggattcgccctcatctttggaattccggtgatggcgtttatggccatgttcgtctccttggtcgtcggaacgacgtgaacgcttgtgtcggcggccatcgtcgtcgcgatgcctggactcgcgaactcgctcgctgtctcgatcgcgagatctggaggaatgccgccggtgatggtggtcggaatgatgacggtgttgtctcgagcgctctttgctgcgatcgcgatcgcggtttcggtctcgatgatgtcgcccttcacttttctcgtgtcgcggctctttcccgtctgccaatgatttctcaaaatcttctagagtcatggtgttcctgatatgtggaaaagggatgagaaaggcaaaatatggaatgacgtttataaaatgccgggcggtccaattgtagatctttccccgcgacaaaaaagatttcgaacagaagagaagagcttatctttcatcacttggcttcttgtcttccacccttgaacaatacataatcgactacagagctctctgtaattttattcgcttgatcgagtctatctttctataaacttccttcaccatggcatctccggtggccgtggtctgcgtgggcatggcaggtaaggatgctgatcgcccctcacctatctacaacgatctaatcgtcagtgttatggattgaataggctcaggcaagacgaccttcatgcaaagaatcaactcctatctgcatgaaaagaagaccgtgccgtatgtgatcaatctcgaccccgcggtgcattcggtacccttcgagagcaacatcgatatccgtgactccattaattacaaagaagtgatgaagcagtacaacctgggtcctaacggaggaatcttgacttcattaaatctgttcgccaccaaagtcgatcaaattatctcgctcctagagaaacgcaccgccccgaaccctgaaaacccttccgcaacaccaatcaagcacatcttggtcgacacacccggccaaatcgaagtctttgtctggagtgcatcgggcagtatccttctcgagactatggcgacatcattcccaacggtcatcgcatatgttatcgatacgcctcgcgcaagctctaccagcaccttcatgagcaacatgctgtacgcatgtagtatcttgtacaagaccaagctccccatgatcttggtcttcaacaagactgacgtcaaggatgctgagtttgccaaggaatggatgaccgactttgatgcattccagcaggctctgcggcaggaggaagacgcgggggcctttggagctgagggcggtgccggtggctttggttctggcagtggatacatgggctcccttctgaacagcatgagtctcatgttggaagaattctatcgacacctcagcgtcgttggcgtcagctcaatgaccggcgatggtgtcgaggagttcttcgaggctgtggagacaaagcgacaggagtttgaacgtgactacaagcccgaattggagcgcaagaagaaagagcgcgaagagcaatcatcatcccagcgggagcttgaacttggaaaattaatgaaagacatgaatgtgtctgggtcaagccggcagccgccgaggaaatccaccgaggagcctgagactgtcagtgaagccgaagatgaagaagatgatatcatcaagcgtggattggcagatggagaagacagtgactatgaggactacgtggggcctaacgctggcaatgatgagggtcttactcaacgttaccaggaggctctggcaggctcacaaagtactccatcagagcaggataacagcttcacaagatatctgcgcgcaagcaatatgcaacagtgaagcaatctgtcacaaaggggtcttacttgttctgaataggctcggcttacggcgtttgtggtcttagaggcgcatttcattatatcaaagtaatcaaatatcatcttagtctattttgtcttcgccttggtatagtaacacataccgggtgaacctttgcaaacaagtcaaacggcaatgttgctgtatgacgtcacttgctcataatgcagcagccttaggaaatgatcgcccagaagcttcatcttctccccatttctgatacgagctacttcaatctcgcgagaatttcaattccattcgaacacatactagcgaatttccatcatggatgtgagccaatcctattactgtctccaagcgtcggaagatagacctcgaaaccggagccaaaagctaacttgacaggtctttcgcgcctacacatacacgacagccgcatggctgtcacttcagagtctacctctgatagccggaccgagcatgatagtgaccctgctcttggatgagactcggcctgcttcccgtatgtggcctacctcctgaatgtgccgcgcgcacccgtttacgagccatgctaacctttcgcccttgaaaagccattgaactatacttcgcccggtgtttcggcttcagtcttctcacaattgccgttttgaccatgatgctgaccggctccatccccctgacggccgggatcagggagtctgtgtcaacagaggacgacgatcccaaagcaccatacgctgtgccaactctgatggtgacctctgttttccacaccacatgtgcattttacgcgtacacctggtatgtttccggtggatcgggtatctttgctgttggtgttgctggatactctactattgcggccattgggttgtggtgcatgctctttggcagcagcaatggaaggatcagtcgccgtaacggtgcagacaagaggacagcggggtttcctttcaagaactcggaagcagcgaagaaacataacaagggtctgtaagctgccgaggctggaatcaacactgcatccatagattcaatgtgaatatcgtatcccagtgttttagtagaataaatctgctattcatcattaattccaaaaagataattcatagaagccgttttttttttgtacctgagatcctcatgatgatccgagcttcccttaaccccacaatgccgcttcaaccgtccttcttctcctcaaaagcagcacgcctctccacaactttatattgtttacaagatggactctgagctacgactgtcgtcgccccgcttaggaccttcaatgtcaatgaatgatcagtctaacctacagttaggccaatttgacccggaatcgcaacccttcgggccattccgtcccccgaccgaaactgaatcacagctccagaacgcgacgcatgcgtttattcgtcctccacgatcaggcgagtcggcgaataacttcatcactacgtctcaatccacacagcagcacccaggtcaccctagcaatggagttgcctcgcacttacaaccgcaagggcaatcctgtggtttagatcaatcgcaggactacaataatggcgtcgctcatgcagcgaatatgagtggggcattgcatggcgctactgctggacaaatggcacctccagcatcgctgtctcaaaacgagctagcgatgggaaacaacgcgcatcaaactcagaataacagcttaacgctgcagtcccaaggccaaccgtttcaaccagacttcatcgagctggatactggctccacggattcagtggccttcaatgggcccggagaactgcaaggcttcaaagtggtcccgaaccctccaaatctggattactggagagataggttattcaacgtcgatgaaatgatcaccctaagcgaagaggagtatgcaggctccattgttggaatgattgataccctactagaggctgactcgcacatttctacagattccaaacctacttcccccacgttgacaatgtatactctcatcgctccacccagcggtacaagcgtaaacccttcgtctcccattactgggactgtcgactcaaaggacgaccacccggaacccccaaatccgacgacccagaaaaaaagaagcgcaagcgtacggccagagaacgggatctctgccatgttaaaatcaaagtcgtggaatacttcccagtgtccgaaatatcgaatttgcccgatgcagtcgagcccttgccatctaacatcttacctggcatgtatactttctctctgaatgacgactccgcgatccgaaatgtccaaacattcggtatgctcacgcccaatcctggtctaccaccaaatcacccgggatcgaacggtggaagatatttcactatacagcgggtgaatggcaatggtgccaacgggaagaacgacggagtgagcggcggtcatcaacatacgcttgaagaaagtgatcgtgtcaagaaaagtagtgtgcaacgatacattctgaaggaaaagaaagataaaaggacgagagcggtatgttgatcctgttttgttgtgttcaattgcacaagagtatccccgccggctacgtcacaagtctacattgacttcatacttcccacatgcgaaagatcttgtctcatccttttgttttcatttctatcatttttaattgtgcagatttaacacgaaatacacaataggaccgagtcatgtctcgaccaggccaaaaatcataccatacaaaagcaacgggtctggccgctgaaactgcgatcaaacactctgccgatgttaatctcaagctatttgggagctgcttctggtgagatcctcccaaatttaactgttctgacgaaatcttgttgtgtattgacttaacctgcatttgtagcccattcgtgcagcgggtatggatcgcattggaactgaaaggtatcccgtatcaatacatcgaagtggatccgtacgaaaagccccagtcactgttagaggtgaatccaagagggcttgttcctgctttgcgccacgacgactggggatgctatgaaagcaacgtgttgttggaatatgtaagaaaccccgaggagccaatttctcattttcctcactgatcaatcccttgcagctggaggacctgggtgtaggggctgcaatgcttccagtagacccaaagctgcgcgcccattgccgattatgggcggatcatgtaagtagacacacaggtctgttctggatcatcgctgatagccctccaggtcaatcggcatatcgtgccgagtttctaccgtatactgcaagagcaggaccaacagaaacagatcgagaagacacaggagctgcgagatgcgatggagaagctgctcgaggtagcgcatacttcggggcccttcttcatgggcccgcagatgtcccttgtggacgttcaagctgcaccgtggatcattcggctgcggcgggtcctgaaaccataccgaggatggccagatgccgaggagggaagcaggctggccatctgggtgaatgcaatcgagactgatccgcatgtgcaagcgacaactagcacggacgagttgtaccacgacagctatgagcgatatgcccgtgagtatcgctcccatgcctttttcaatagcattgctaatgcttcatgtgacagagaaccgtccaaatacatcccaagtcgcaaatgcaattaacgcaggacggggcctcccttaataccagaacaacgatatctgatggcgtcctgggacgaaaaggtgttggccaaatgtacattagcctgttttagcacctcgattgaaattgaatccacccctcccacttgcatcagggcctcgaggactgcgcaccggctgctgtggggcttgagtgtcggagccgcttcgctcgacttgcggacggccacctctctgtaggaagggtgcattcgacttggaagtagagggatcgtagagatgtctggacttgctcgaggtcgacgaggagtctctcttctggtgatctcttccgccgccacgtccttttcctctgaccctgccctcgcctgtaggggtttgacgaggtggagtcgtactaccgcccgacgaggtacccgaggctgtagcagatgggcttccaaatagacgttcgcgcacttcttcgtacttccgctgcttctcctcccgattcttcagtgcaatagcatggcgctcctcgggtgttggctggggcggcttagtgtcatcgtccgagtcgtcatcttcgtctagtccgagtcggccaaggccagccgttgcggcactgattgttcttgaagatgatgaatgtcttgtcacaagctggggtttccgactcagtagtgtaactgcgggcttgaagtcttgcttaagaggaacatcggcgcgcgcttcgacgaagtgaaatgtttctgcggattcactgcaacacagttcagtctcttgaacaacccaaagaatgacaaaagttaggtggcgattgaaacttacgcttcagcccatagctgacgattgaactcggcctgttccgccctgcgttgcgccttggtcaccttggatgagactttcttctcggctggcggggtagaattggagtcgagtctctgtaaacgatgacgatcagcatgccaccacagcttacaagcattgagtagaatttgatagcagactagtgtctgtcccaaatgtcacataattccctgagattacatacatctgcttgattttcccaggaatcctcccaggcatcgggaactgcaccggagtttgcgctcattgcactcataatgacggttgcaggattaagaatagagaaggatactgaaaaaaagaaggacgacaatatgctaaacacgaaggctagcaataactcgtatgttcatgcagcatataaactggggaagaaggaagaagaaaattcatgcgagccccggggccaccgcctgtcgaccgttgatctctccactccccgcgccctgaagtctgagaactttcgaaactacgaaaccgaccatcgagctcatttctgctaattcccaacaatggcgattggtaggtctctcctattccctcacaagctacacgatgtagccgggcacagtgggccccgcgatatcgatagtgctccatacccacatgtgcaccggcctcttattccatgctacaaactagagactccggggttacatctactaacaaacaccttctagaccctagagacccagacggcgactctaccatgacctcttccgtcgattccatccggcccgacgacggcgctagagccggcgctcgcactccaactggcaccgcccaagcttcctcggccggcgttgacgtatcggagctttcccctcctggctctcagacaaagcaagaagctggagtctctgctggtggcattggggctgcgctggaacagcgcggaggagagtctgcggagaaaacggttgacttaaatatcgcggcgtggaagagcaagcgtgctcaagaggaatatcagcgtgctatggagtatgtcattgataaagatttcacgctaggtatgtggctttctatatgtacttcgtctggctgggtggtttccatccatggatgtctgtacagtgtgctgactggatgccttgtgttcagatgaattcggggatccttttgatgaacgtgacttagcagagaagttgctatgaatctctgcatgtcggagaccatctactacctgggcagcatagatatgaataatgagatacgacttgattatttagcttgtagttcttttagtacttttggtttacgatgagctggcggtcttcgctcacctatggtgacatttgtacgcggaattgcttcgaatcactgctattcaacgtaaagaaaagctgctccaggctcattcggtgcgatctacaagtttcgttgcctactacgcttgtagatgacttttccgaaaagacatcctatacccgagctttagggaaaatatatgtaggatatagcaaatcctcagagccactatatgattccaattggctttttttctatgcttttgtgctctagtattgctatttgtagttctcagttcgtagttagtagcttgctagtcggtgaagatatatagtcaagatatatatcgaattatttactccgtactatttgatcgctggcaaggattgcaattaatcaacagacgtcaccacaacctccaatgaaatcccatacattcatgctatgatcgcccgatctccacgttgggctctcccatgcagtggttggcagggcaaccgggggaaagacatcaaagcaaaaccccaacggcccgcttcatgactttcacatctatcacgacaatccgacaatccgacattttactgaggggcaggctcagttgcatccttcgattcacatttttaaagtagatgacttgccttgattcatttaactcgaacatacttggtccaacatttcaacagctttgacacattccatacgcgtcaacaatcatggaaaaccatcctccttcaccgcaggcatggtaggtcaattgtttctttcttgctgcttttggattcaatcttttttttcttctttcctttcctttgtctttgaatgatcatactcgcctgtcgctcaggtgtttggtcccttttcccctattttgagccagaccgctatacagacttgagactaacgcaactgccttacgcgctagcagctctgccacaaattccactgaaagttccttcagtttcacgcctatcaaagccctgagcgccttgccgcgactgtgggatcgtaaaccttctacgcctgtcagggcaggagacaaaacacgaaagctgtggaagcgcattcgctttccgtttacgagcatggttaccacgacagaagtccagactacgggggtcggcgcctctaaaaactcagattatcagcgtggcgtgaagcgtctgtgtgttgattccaccggcgtggaccaagacactgaggctgagcgacgcggtcggtctttccttgagactaaatgggagatgcaggcatctcgtaaacgacgtaagtttcttcctcgattatgggggggcatctgcacatcgcacgtggcatcccgtgctcctgcatttagaaagacctttcatctgataatttgcaggcaaaatgcccgaattcgatttcaacatccacgacgagggctcccaggaggtgtttagtttcactgcgaaccagcccaaggagacgcccaatgatgctgtcggcgacgtagctacgaatgcggcaccccagtcgctcagcgatctgtggaagacttccaagacgccggtctataacgatgccgtggcgaccgacctaaatcttactgcatctgacgcgaagacagcgcaggatgtgcagtctagatcatgcagccaagacgcgccgattgtgatcgacaatacaggagtcgacaacaccaacttcgtgtccaccacggaatccgtgcaagcactgacgcaagagcaggaggtcaaattggtacgatcggcactgcgaagctccttggatggagagaatgcagagctgctcaacgactttctgtccagggcgaatgcgaaacgggccgccaaggccacacatcccggagatgcgaaatcaacggagatgggttctagcccagaggagtctccagaagttaaatgctcaacaccgccaccacgccgcgtgttggaggaattgacaaccaactcaccttcacccgtcaagttgcagttctcgcctagtaaatatgacgtcaagcgtggtgccgatggtgcgggtgagcggggggatattatcaccaaggaggatatcattccgaaagagatcatgggagaacaagctcctgcaagccctgcatgtcgtcgcagcacccgtaccaaaggcgtgaatgccccgagcatgcgcaacacgatctcattccgccgagccaaaggcacggaattcgtttttcaacagcgaactgagagccagcagatggcaatggccacaaagcgcaacacccggctcaacaaaggcaaagctgtaactcctatagtcattttgcaagcgctggctcaacagccgagcgaggaagagctgttgccatgcaatttacaaaatgagggctcgagccaccaggacactaacaccggtgcactggctaaatcgcgaaagcaggtgtcgtggaatgaagagcgcatggccgagtatgaagaatacagagagccaatggacgaccaggaggatgaagaggagggcgatcggtgcacgaatgacgtgggcgcaacgcctcgcccgcaagcagaaagcaagcgctcagcgaagaaagcagagtccggtcatcgcagcagccgtagccaaacgcaaaaggccgacgcgaatgcagacagtggggccaccgcgagcggttcaaccccgactactgcagctgctactgtaaccccgcgctctcgccgggtgaggcgtttgggtgattcgggaattttggggtctggacccccagttaagactgcaagtcgcagcacaagcaagcctcctgcagcctcgtctattgtggctgctgctgccccctccacacctaccaagggccgccgcaagcttactcccaagtcccccattccctcaaagcttcccgcacgagcctccaagagtgccaacaccgcggaccagcctttcgtcagtgggatccccactcgcagctcacaaagcacagatgatgcacagcgacagagtatgcttcagatgagtgccgggtgtacgcccacggctcggcgcgttcggtcgagatattattgattggatatgcattctcattggattacgactactcttctgaccgttctataccccggttcccattgtgacgctctttatttatcgggggagttgctcgtgttttaagataccaattgctgtttttttttctttatttcatgtatgcattcttattgaatttgtaaattgttccctttccttcaccttcatcttgatcaagataagattcgctgcacggttcacctgctttatgcaaaatgacgtctgtgccgtcgcgccccctcggctgcccctcggctgcccctccaaccttggaaccttcgggatttgtctgagggatggaatttccaatctcagaggttgtgctgtcctgttttcattcggactacattcggactacgatcttcgcgttgaaaccaatattatgcacctaaccgcattgacaagctctaatagtctgttccgttgatccctcgtgccagcgaatcatacgaagtactccgtatatacggctgccttccaaggctgttacctgtactgatagccgatacatgctgatcgttgttctggtatttgcaaattgtctctaaaccgagctgggatttgcaatgtctttcatacaatgcgtattgtagatgcagttgtatctcatatggcgtcctcgtcgagcctaccttctatgttgtagtacgaacatgtccaatatgaagattggaatcctacaccagactgctccaccccaatgatgcagtactccatatgctacccactccctattattgaggctgggaaacaagttcacaatccggctatgtgcattccaatcctccgaagttcctccccatcggctcgtcggtcaacccgacccaaaaggtctcagattaaaaagtcaaagagcgtttcatagcccaaacaaatgcggcattaaaccccatacagaatcataaataaatccgatcaatcggcccaatggaaagaggaatgcacgtactccgtatagtacaatacaacatacatagatactacctactatgcacatgcaacatgcatacatacggagtcctccccgtacctataactataaccatcacacccgataaaccaatagcgaataaccccccaaaccgccaagccccattccaacgaaccacctcgggaccaccacaatcaaactatccccatcaactacccttaccctattcggcctttcggtgttagccacaagcagtatgccatccgactgtaatctgtaatctccaaacatcacacccgccatccgatatctcccggtggtgtggtcggtagtcagcaacgctaagacccgatgcggtaagtgcgcgcacaactaagcgccttaagtggcgcatggggttccgagagccacatgggtcaacgcgagatgacatcgtctgcagggctcggagcagtgtgctccttgctccttgttttgcattttgcacatggaaatgaaatgggagtggaattggaaatgatatccgctttttagggttgtatttttggggttaggccagttaaatcagttaaacaacttacaacatacaatataggttgtactatgttgtatacgatggttgtatggtttgttccacttggctgcttttgtatcgctatttccgtcttaaggtgttggtgttggcttggctttggcccttgtcaggtacggtgtaaccctactttggcttttggattatttttcttcggggatttaattattggttggaattgttaaggtgtgaagaagacatagtctatgttgtatactaacactgttacaacggggtccttttgcaaattttgcattttcggtactccgtaccaccttccttaatattgggtaatcttcccagtccggtttgactcgccttgatggtggatttggggcgggtggttgtggcagccggtgtatgagattaagtggtcagtgtcagatcaaatggaagaggcggctcaaatgatacacaatctacagtacggagtacagctgaaacacagtaaacacaataatagagtaagatcatggtatgtccaattcatctgatagagttcgctagtcctttcattaactcatttccacccaccccccttggggtattgctcggggggattattttcgtctttttgtaagatggtcaggaccaaatctagtctttgtggggcgcagtgtgaagaggctcctcgggccagttgttgtagccgaaggtctcgtgcatgttgacgaagcgagtgtgacggcccttggccaccgcattcacagcctcaaagtcttcatcggcgagctcaatggtctggaagttggactcaatgcgcgccgggttggagctcttggggacgacactgtatccacgacgcagaccccaggcaatcaggacctgggcgagcgtgtggccacccttcttggcaacatcgttcagggtcttgttctcgctgacccgctcgcctgtcgtggggacctggttctgcgagcccagaggcgagtaggcctggggcaagatgttgtgggcgaagcagtactccaccaaggcctcgttgggcaagaaggggtgaatctcaatctggttgagcataggctggaccttggcgtacttggccatggcttcaagctgggggatagtccagttggacacaccgatggcccgggtcttgccatcggcgtacagcttctccacggcgcgccatgtctcctcgttgttctcggtcaaatctttgaggatcacgtgctagaacgggttagccgggagctggtcgtgtgctttgcggggaaagctcttctcacctttccatcgggaccgatcaacggcttaccctggccgtccttctcgcaagcaataggccagtggacaaggaagaggtccacgtagtcgagcttgagacgctcgagagagttgttgagggaccagaggacgtcatcgtagcggtgcaggtggttccagaccttggtgcacacgaagatgtcctcacgcttgacggaggggttggtcttgaggaaatcatggatggcgtccccgacctcaccctcattgaggtagaaccacgcgcagtcaagctgacggtagcctaccttgagggcagtcgtgacggcggcgtaggtctcgcccttggagccctcgttggcgaaggtaccgaagccaacggcgggcattttcacgccgttggccaatgtgtaagtctttccagatgacatgattgcaatgtagttgttagagaacagaagggaaaaagtacgcagaaagtacgagctgttggaagtagaagataaaagtgggggaagcggtgttggaagtggggtaaaaggggttggaggggcagaagaaccttgggaatgggaattatataacactttttcaattgaccttggaattgccgtaacgatgcaatctactgcaacttagcccgacctgccctgttccacctgtcgatccaagccactggctctgatcatcctgctctggcagagtcaaagacaccatcgaatccccaaaatgactaaaagaaacgaaagcgaggacaaaaataaaaagaataaaagaaatcaaaaatcaaaaccccaaaaagaccgctagtaattttcaaagctccgtgcgatgacatcatcaaccgaaacggtgcgcttggcctgatcgtcatcggctccatcgatctcatgtcggcccacgggtgcactgcactccagtccaatcgtctgcccgtctcaggcctctctctacccactcggcgtgctgggttgcttcacattcggcccagcaactctggtcctggccaatcagcgtctttctgattttattaggccgcgggaagcaacacgtcccgtgtattgggtacctagcaagacacggtgccagccacgatgacgcaggtaccctatacacgcctgtctcgttgcgagaaaacggtccaccctatcgctcgccaaatgatgtcttgccaaatgatgacgataattcctaggaatgatgatacccggtgagtggatccttcgtaacctcaatggcaaaataccaatttcgtttgtctccattatttgcgtccggtatcagatatcgcttgtatatatactctcctgaactccctcctccaccacctcccttatcagccaattttcattccccttctccctttttacaacttcaattctttccttgagtcctgaatccagtgactcccgagtagaagctcatcccatccttctacccctctatcaaactctatccaataccttcatcatgtctcgcgtcgaggactctgacctcgcagtcgacctggctgagcaggatccccgcgcccaggatcctcagggtgccctctcccctcgggaccagcgtgctagctccggtctcgccatcccatcggcaggcggtaacaccgtcgagatccccgccacccgcagcgccatcagtgatgccgctcaattcatgcacaacttgagcttgtctccctccatgagggaccgccggggatcgcgtaactcctttggcacttcgctccctatcccccgctccccccgcatgtcccgcctctcgtccgtgcagcgcggtgctccctcagtctcccgcgatatcttggcctctcaggttcaggatatcaacaaggagctgactaccaaggcgaagaacatggcctttgctttcgatattgatggtgtgctggcacacggtaaccacgccattgacgaggccaaggtcgtcctcaagatcctcaacggcgacaacgagttgggcatccgcatcccccacattctcctcaccaacggtggtggtaagaccgaggaggctcgctgtgctcagcttaccgagattctcgagcagcccatctccaccgaccagttcattcaatcccacactcccatgcaggccctggcagagtactaccagaccgttctggtcctcggtggtgaaggctttaagatccgcgaggttgccgaaaactacggcttcaagactgtcgtgcaccccaaggatctcctcgcctgggacccctccatctccccctgggctactctcaccgaagcagagaaggccgaggccaagccccgcgacttctccaagatgaagttcgatgccatcatggtcttcgctgattcccgtgactaccagaccgatatccaggtcattatggatctgctgctcgccgaggacggcatgatcggcaccaaggccaaggatcccgtcgccacccgcattcctatctacttctcccagggtgatctcctcatgcccaccgagcacaagggtcttccccgtctcacccagggtgccttccgtatcgccattgaggctcagtacaagacactcaccggtgtcgacctcgagcgtgttgtctacggtaagcccgagcgtgctacctacacctacgccgacgaggtcctgaaggcctggatggaggagctccacggtgtttcccgtctgcccgataacgtctacatgatcggtgacaaccccgcttccgatatcatcggtggaaacatgtatggctggaacacttgcttggtccgcactggtgtcttccagggcaaggagggcgagaatgaccccaacagccctgccaacttcggtgtcttcaacaatgtcctcgaagccgtcaaggctgccctcgccaaggagctcggccccgacttcaagctcaagtggaaccccaaggtcaaccccgtcactcacggcgacggtgcctccgccattgagtaaacaattgatcactctgatcctttcacgctgaaacgaaactcgaaaaacatgtgatactgggcttgagaaggatttcctggcgtttcgtgctttttttcccccatatcatagacttcttttctttccatttctctgttaaggccttctgatatcctttgtcatgtcgatctggattatcgacttgatagactgatatttgctttcttttttttacaatgtggatggtcgatggtttcgacctgcttttttcccttttagactggattgctacatatctcatgtgccatgacgcgaataaccttttgttttgctatatcccgatactccaataccatatcaccagtttttatcattgatgtcgtcaattaaatattcttaatttgtattcctttttctagaaaactggtgtattccaaaagtttgattattccagaaaaagcactcattgacgacatggtgatgtattctccttagtactagacctcttgtggagggatcttctattatttcccacgtctatatccaggtctatccatggatgcgtgtagttagtattctttaatacttgacttttacacatgaaaacaagcgtcagaaacaatatatttacagagaataatatcaaaatccatatccgtcaaatttgtacactttcgtctagaccacgcctggaccactaatgtttcgggaaacctggaaccagaagaaaagcaacaactaacgtaagacatcgatacaaccgccagagtggcaaacaaatacccggcattatctcaagacacgcacactgtgagtcgggtaggtacacaatatttgagcgggcatgtatgtgcctcagcaacgaggtatcggacgagtttattgtctcgattgcgcgtacgctggctgagtcgttctttggagggcgttgtaagctgcagcctgcagttccacccatatatcataggatacatatttgcatacagagaacttttgcgggctcctttgctggtttgcttgttgttgtcagtaagcaattgaagagcgcatgccatatcatagattcacacgaaaaggaatccagaatccagctctactgattatcccacggttttggacgcgaacaagaaagcggaaaggcgcaaaacttgtagaggaagactagttatataaaggaggactatgacagttaagtctaagaagaccaagctcagatcagagcagttctgtgataaagtatattcagacccattgctcacccaatccgcgactatctcatcgccgtattgattgatcgaactattgtataattcaatgagaaaaacccattgtatatcctagtgtaacttacggatcggtcagacatgaaagacctgtggaataaagatagcgatccgtcataaatgtagctggctacaatttagcacgggagttgtgagatagcgactctaatagacgagtatcttactaggataagcaatcgaaccacctcgaaccataacatcggttgcctcagtgcatgcagtttaaatggcttctcgcaagatcagagcgacatgtactttcacacagggcgacaagttgctcgctagggacaatatcaaagcttgcacttctgctagatatcagcaaactcaaccctaatgacatatctgtaccgttacgattccaagaaacatactcaactccaatgtagccaacccaggcaggacatgatgttactgtggtattgactgcgtcgaagcaggcatcgctcagacccagattatcatatggcatttgatagccatcgagctgttggtaggtgactaacatgccaaaggagcccatacaagacacatgattataatcattgtcgtttcttcggtcacgcttgtgttgaccaggaagaaaagggaaagatgagatgagcaatccgtctacgagatagtgctttaacaaatccactcttcttccttatttcctatagcaccgagtccgggaggaaagaaaaaggaatgtcgcctgcgaatgctaaacttttcattttagccaaagctccaggcttaactaggaacttgactagtgggcacagcgggaccccaagaacctgcacctcttgtcgttccaaggtcatcaatagaatttgttccctcaaactagaaccctatcaggtcatgtgatagagacaaggattccttttcggtggctgaaactccaactccttttttacaattctcaacaatgttcaacctattcttaaccgggctcgtggcatttctacaacctgtttctagtcgtataatctctgcattacatcagcgctgtctaccatggagctctctagcgagcctcggccgaatcaccagaaagccgtaacatcagcagacacgcaccatggacagctataggcaaatcgatgcctcctccaaacaccccgggaaaaagcgagatctcccatggggattcgcgatctaccactgttcttaaaaggacgagagcgtctgtaatcgtctactccagtacataaaggaacaggtcaaagccgatcttgaaggcaaccagagaatggaccttctactacatcaccagctggtcatcaacaatgacatggcgaaagtcaatagtgctgcatcccatgagattcggaaccacttcaacgaatgggttgcagatcaactgcctcaggtcgtcgccagccctgaaatgctcgaatatctccaatctcagaaacttcctgatcatcgaggtccacagtacggcctcggtgcgcggtataattttgcctctttgtggacgatttctgcttggagtcaatcaagtatatcaatgattataggttcgatcctgttgtcaaggttctgtcagggttctggggcaatatgactccccaggagagggaataccaaattcatcctgattggcatgatggagaaacagatgatgaactcgaaatggctggctggatgcatattcccatacaaacttatgtgcggtcgtatgatggtctggaacagccgggggattgggatgaatattatgtacggccacccttgatgttgaacggatccagtgcattattacatctagacgaagagctcgctcaaattgaccgtgagttatatgtggtctctggttatggtataaatgctagattaaccgaaagacaaaccaggggattgaactcacaatttcaacgtagcatatcatttgtttataatgtagtggcatttgagcacgaattttggaatgattagttcaagaggatccatagagcaaggagaaggatcaagacaacatccgcctccttgtctagttagcaatgcggagaggcttggcggcatgcacaactccgcggaagcgcaccttcatcacgaagcatgcagtcaagcccgatgctgtaaaatatactcacctcgacaggcaaatccaagtgactcgcacctttgaatctagactgggttgcattgttgctaggttgcatctctagcgcgagaactaagcctttgccaaccccgttgggcaagtcgtacgaaccttggaatgatacagtgcgagtcagcgagccagccggtccgacttcaacccggaataacaaggcaagagattgcagggattgttctcttgccgtaggaggtaggaggtaggagacagaaacggggttgtatacctacaacctatgttgtaggcttcgctttgacagtggatcaggagacaagcaaagtcggtgagagtaggaagtattccgtatggcgtacgtcgaatacgaagatagtactccgtactagcatcacccaattgttagaccaagactagtggattggttctccatcggagctccgaaacctcgagatcatccaattcgcgtctgaaaggggacagccgtggccggccgtacgttgtgggttctcattatgtaatagcgcctggatccccgcatgatcggctccgagagaggcgagttcttgggttgtcgatgtacatgggaggtttagctgcatggatggtaatgcgttaggtaaaaagaactctggggtagaggaatcaggatgcatgggatttgatctgctgacgtgtggatatcagattattattgcggagcgaagcaattatatcatcctactatttaactacatgtcactattattgtattgtcttatatgttgtagttgtagttatcctgttctaaatgtactaatagaatgacggcacgtttccgcatgcgtcaaaaaaagcaactggagtctgcaggggtagctcgaactaacagaacttaatagcttagtgatataagaagtatagatgtagtaactatagaatttatatttatattgctctatttatatatagattaccttcagaatactaagaatactataagaatacaatacagatccgtaatcaatcagtttataaaagtcgccccatgtggccatgacccatggcgcatttcttagcatttcgtactcttcgaccttccacttcacctccattctgtacttcgcccaaagaaccccataaactcttaagccctcctcttccgatcggagaaaaccctgagattacctccaaattcgtgtaacgtcggttcatccgtttctgtgactaacagcttcgttttttttcttccccgccgcccctctgggccctaaacttgccctccggtctcaatacttctttgacttgaccggggcttttttcttttctttttccaatttggagtcctttctcgtttaaatttcggtataccttattatttttttcgttttgcctgctccaaggtactccgcgactagtcactgtacacttagagccctttatagagggcctcttcctctgcaccatgacctccgttactcctgctccttcgcagaccaagccggccttcccccgactctcttcaatcccctgtggtgatcacttccactctcgcgagtcgtctccctcgccctgcagtaccccggacggttccaggtcgagcagccaacgtcgtccctcattcggttctattaaagaagatacggaggacggtacgtaccgcagatgtgcgaatccaggctggaggctgacgtgatcatgggtaatcttaggaatcgcgcaatcgttcgtggacacgcgcgaagtaccatctccccaagacccggaccaagaccaagagcgtaaggtcgagcgccccacccaaatgcagcaggccccggatttttgctgtccgtgtggtggattcctggggtggaagcagattcgattgggtgggaagagtctgagccgcagctacagcgatctccgtggactcggaagcctccaagcaaagggctgggcatgggaagcccaggagccccagactatggagcttctcccaccgaaggtccccgaggtagagattttgcagacccctcctggtaaatcatcgttggagaggttcccgccggaggttcttggtaagaacccgcactgccgttcttgtttctcatgtgctaacgtcttgtagatcaaatcatctctaaccttgccgtcgatctccccccaaatggctacgccccccgcaacgtggatttggtctcgtgcctgctaacttcccatacgttgcacgctgcgaccttgggtgtcttgtacaggaacatgactttcccacactccatcattttctccaaggcactgaatcacatgtcgcagtatccggcgttgggaacattggtgcgccgtctggacttctcgcacttcacctccgtcggcctaggtcgtactaagcagatgaacgcagaaattcagaacctgacctccaagaccctattgcagtgcttggaactcctccctaatttgaaggaatgcctgctgcaggaacacctagagggcgacatcagtgtagaagtggtccggaagctctttatggggctgccgaacttgcgcgctttggatttctgcggttgctcgactcaggctttctctggggttttccaggaggctttggtcaatgggcctgcgctgtccataactttgccgaacctgaaacggctctcgcttcacgaatgcagcgctatccccgctcccatgttcgactacctcctcccgcgattggtcaacttgacgcacctcgaccttactcacacccaggtcaacgattcagctctcgttgccatcccggagactgcccgtatctctcatttgagcttgtcccgatgcacgcgcctgcgcgcctgcgccctggttaaattccttaccacccacccctcgatcaacgattctctcgtttatttgaacctgttgacggacccgacccgcttccgtctgctggaagagaccgatgtgtctgctctgctgccgaatctgcccgagactctccgctccctcaacctgggtggagccaagatcacttcggaccatgtaccacacttggtgcccctgaccaagcacctggaggagttgggtctcagctctgcggatctctcagttgcggacgtcaactcgttcttcagtccgtaccgcaaccctgccacgggaattgaggttgatactcccagcactctctgctatctcgatcttgccaaggtgccgcagatgactatcggagccatcttcaacaccagtacttgtttcctgctctccgacaaaagctatcccttgcaggtcgttgaattcagtgacaaaattatcaccccactgcgtgagcgtgcgaagacccatcgcgcatccgttggctggactgtgcgagacctcggccgtcgtggctggtacgttcgcgaaccctcctccatgccccacgaacccctcgacgatggcgcccgttactggaagatgggtgcacgctggtggggtatgcgcaagatccccatggccaccggcgaggtcggcggcctctacggccactacatgttcaagaaatgatctactatgagcgttctgttctcaaaagcgtcttcgctggatccttttatcacttgttgctgatacccttgatttgatatcctttattttcatttgtgttttattggaggcctcgcttttcttgctttattgcttttcaccttttgctttttgtttcacgatgaatgataatattcggtctatgcatggcggcgcgcaacatggtttacgaatttcggcattctggctcctggcttcgggttcgtgttctcggtcgcgttttgtcttttggttttgcatagcatctgagatctatctcttccggtgtctggtctttctatcttatatctctggcttcatatggcgttactgtatttatcgggattttactctgctcataaatacctatctagtctctacttcatctcttataagttcaatatagttgactcgatctgatagccctgtgtcttgcacttcattgggaaggagccaaccaccgtcccaaataggcaactacctgggacaacatccagggcacgcgttctccagaaaacgcgcccctccattttattctttctcacacagatattttgctttgttttctcaaccatcctgctgaactgcccctagtctaccactcttcagcatgcttctttcactccagtgctataggtaagttgtatttcccatgctcactaaggaacccgaatttaatccaaccaagaggacctcctccaataccacaaggaaccgaaagcccagccgggaaatgaagcatttcgggttgactccctcctctctgctgtccatttccaagtcctgaagagacacattctcgagtcttcgacccgggaccccccgtctatgcgcgggtcttcttacctgggtgtttgccttggtcctgccagagctagcgcatatgggcttcctgtgtctcccttttagtatgggacggagaacaagagcatcactttcatcgctgtgatgtaaccctctgggactttgcatcacgatgaagtcgctgaggagatgatcgacctcccgggtgagttgttttacatgcgtgatctagcatggctatcaaaactaatcggagaaaggagtggcttcttgctgagcagaggcttctgaagaaagagcacatgattgcattgtcggtgacggcgtttctgaatgtgccatcatattgctgaggaacttcgacgctcagctaaggatgttgctggcggatgctagatttgaggactacaacaacgaccacctagtcctcaagaaagaaattcgaaacgcaatcctgcaggaagccagacctatctttgagcagatcgtcaaggaggaacaggaaaacaggttggagagctttctcaaggaccgaaggatatttgccatttgacaacataccgtccatggcaatatttccctcaaaattgatcttcatggttggatgccttgcatgggctggtgccatagttgattgtgatgaactttttgtttgtgctctttccataggaatctttctctctacattcttctcctcactttgtaagtcattgatatctctatctactgttatttttcaaaaagggctttggcaatgtaatttgttctccgttagaattccagcttcattcacttagggcttggctcccaggtgacgcttggcaaacgtcaaatgtcaacgtcatgtgatgaatcgcagaagagccgcatttctcattattggtttcacctctacacgccctgtctctcacgaaggtctcagacccccttcgccaacttccgcccttggggaattgctcatcccgatgggtggattcgttaccgcctttgaagacagtggaagctgtccagacacgcgacgatgtcacctccgagcggagcggcctcttacaagaagaaagatgggaccctagctatatccgccgatgagaagtcggtttcatggagtcctgcggtcgcaggggccgggaatacgatcacaatccccgtggtcaacatcactagtatgcacccaccccaccatgcacaaggtttgtctctttgctgactcgcgcgactgctagatctacaacagaccccagcctcgaacccgaaagtgatgctcaagatcttttcccaagcctccgatgcgcctccgaatagtacgcccgatcaatatgtcttcctgttcacggctggagcaaacgcccgcccgcaggccgatgtcatcaaagacacattgagtgctcgagtcaatgcggtgaagtcgggcacgccatcccagacgccgggagcaagaggtgcgtctgagggactgtccgcggcgatggcgattgcgaatgctgtgacgtccgccgggacatcgaagaaccccgtggacgaggagaataggcttcggtccgacatagaactgcagcagtcgctattacgatctgattcgaatctgcagcggatgtttttcgaggggttgcatacgaaaccggaagcgttgtcgtctggatcgtttgtgtcgcagttttggtcaacacgactgcatttactgcgcgcgcacgcaatcgaacagggccaaatccgtggctcgtataatgtgttgtcttcacttaagccgcgagtcgaggataatgtcacgcggttaaatatcagcaaagagcagatccagctcatcttcacgcagcacgcactggtcaaacgcgtgtacgatgagaatgtgcctaagctcagcgaacaacagttctggtcgcggtttttccagagtcggctgttcaagaaattgcgcggagagcggattacggaggctgatgcaacggatgccgtgctggacaaatatctccggacggacgaggctgctcagccggaccgcgacacgaatatccatcactttttggatctggctggcaatgaagtaaatcacagcgagcgtagcggaaatcggcctgatctagatatgagaccgtctggcctcgacaaagtacctatcatccggacgctgaacagcttgagtgaaaagatcatggccaacgtggctccgattgacggtgatatgagtgccccgataggcatcaacgaagaggcatggaaaagactccagctgcaggatctttgtagcgaagaacatcaaagtcccatcactctgaacattcgtgatcaaagtcgtttcttcactcatggccaagaggaggataagaccaagcaattcgtgaaacaagatccggagcagcttctgcagattctccgtacggagatcaatcaaaatctcccatcgcagggcaatacacaactaggcaagctggtggacccaggcgatgacgaagacgaggagatggaggatgcacctgccagccgtcgccctgtcggctcatctgctgctctccacgatgcattttcccagatcctggaagcgttgcgtgagcgtcgtgctcagatgaaggagcgagcgacatcagaaacatacgggctgtcgatagcgctctttgaccgcttgacgttgacacacgctacaaccacagagttcctgcaccagttctggcaggcgtttctctcaggcaaccccgaccgcgctggagaggtcgcgtctttagcagagtctctccatcgagcaatggagcgtattaaggctgttgctaatgacgcagaggctgagcggaaggtcgaagttgaccggctgaagaagcaggcccgtgacatgtacgagagcacggggcgaaaattgcgagtcaacttagaaggcgtggaggggggccagaaggttgtgaaccagcttcttggtcctacgctccatgcactggaggttgcatcgactcgatatcaaaaagaattggccgaacaaaataaagaagcggccatggctgctcaagacacggcggggacatagaagggaacaagccaggcgtttgagattggcgcatgggatgtataatatgataggttataagaagttcaatgattcattcatacagagaaacaaatctcgatatctcattaatctacatagccaagtttgtctacataaatgacataaaaatgatcacagatcggcatgccgagcttccccggacttcgggaccttcatgccatctgtcccctcaactaactactacactaaaccttctccaactccccctctccccaaaatcggatgattctcacaccagatccacactgaagaaaaaaaaggggcctcaagatgctcacctccggcctcacaaatgcgcccctcaccaaagcgctcctcatctacacgatcgcctcgtccatcgctctctccctcttcgacataaaacacctcgtcgtgatctatgtctcgccccatttctggccctactcccagttctggcgcgcattggtgtggcaggtcgttggctttaccaattccagtgaggccctcttcgccgccatgctagtttaccatttgcgggttgttgagcgcgcgtgggggaaacggaagatagcggttagtctttcttttattgtctccgtccccgcagctatgcgaaccatatgctacgggaaacagagaagccaagccgaatggcttcatatacatacgacctatgctaacaacgataactgctcgctagaccttcctgctcaccacactcccctacacaactctcctcccaccaattctcctcgccctgctactccgccctctctccctaaacaatttcaattacctgccctccggcccaacagccacgatcttcgcgctgttggcgcagtaccacgccaccatcccatacacataccactaccgcatcggctccacatccacatcctcccccaccacaacaaacaccaccgacaccaccaccagcaacgatccctctaccgaaaataccacatccccatccgaccctaaacccccaccaccaagcctctccctcctcctctccgacaaatcaaccacctacctcgtcgccgcccagctagccctctcccagttccccgcaatgctcctcccctcggccgtgggctggatcgtcggcgtcgcctggcgcgcggacctgctaccgggtctgtcgccggccagcaccggattccgcgttccggcttgggtcgttggcgagcaggagcggaggggtggggctggggctgcgtctggggcggagagggagaggtatgaggatttgcgacggagattggagggggaggttgcggcttcggcttctgggctggaggggtctggggcacaggctcagagacgggcgaatactgctggtgagggtggtgggtttgttagtcggttgacgcgtgattggtagtttcgcttgtttttttctaagtgagcttgcatgcaaggcttgtcgggcattttctatctggtatagatgtatgattgagatagttattgggtcttttgtaggaggtgctagcccgtcctcaaagccctatattcgtatatcatcattgattcatagtgtcccccaagttcaaaatctcaccaattcataaatatacaatacgataatacttgatcaaagaaagaaatgcataaagtctagaatctcaactagcaaggccgtatctccgctagagtatgtgccaattgaaaacaccacataacgccatacatcatgtctataaccctgaacggaatattaccgtccattgcgactccgtctcatattttccttgcactcgttacaataccattttactaatagagacgagactgttagcaacctgtatgattccaaggcaaagaaaaacctcttaccattcttcccaggcggtttcgtcaagcccacacacgacaaatggaaccattcacgcggacacgcgtcattgtcgcaagcaaccatctcgccgaaactgatttcgttacagtaacagtagcgcggctcgccctcttcgtcttcatcgtcgccctcgtggagcgactcgtcgtcggagggtattgcaggctgtgggatgggctttttctgggttcgtttggtagacgctgggtctcgacttcgcgtgggtcgtgcgtgttgttggctgggctctgtaaatgcggtgaggacaggcgttgatgtcttggaattgcgtcccttggtcgtctcgacctcggcagaaccggattttccatccagatcatcgcgcttggttcctgctggaacggatgttctaccgttggcatcaccgtcgtagtcacggtgtgggtctgggtggacaagttcatttttaacgggtccgtcccggggtgtagatctggaatcggcaactttgtctgcgtggaggacatggttaattgatagttccgggggaagtggttgaaacggcatactgttgttaggaaggtttgaagccgatgacgatggccgcgcacgcgaattgcctggtccagaattctgggctcgtgaagactgtggccttgttgtgttgggtcctggactagcggcagcccgtggaccattgaatgttccaatcaaaggcgatggggccagaacaggagatgcagcactagaagcgttggccctaaaaaaaagtcagttggatgcagcagtgaacacagcgaaatgagacgtacttcttccgggcagcagcggccgaattaggagcgcgagtccgcttcttctctactggttctttattcgcggctctctggctcccagcaccgctagcagagcgctccatcggagcactagtgtcaactggcagtgagcgctccaccttccgacgtttgggtgcagcggtggcgtcagccgcgtgatctccaccccgagatttcgcattgttgttcttgcgggtgcccgagctgcgcgtatcctcatagtctgcgtcggcctgtgcccgacgttgtttccgagccagaacagcatcgcgccgcgcctcactgcgactagcagcttcagcctcttggagcacgtgcgacagatcctgtctttgcgctaccgcttcccggcgcggacgttcattagtcgctgccttcgcggtactcttgttggagtacgcccagtgtgtcaagctgcccaagcgagcctcctcgctgatctcgcctgcaatgtatgggaacaccgtatccagtcggacaacctggcgatccaattcctcgttcgcgttcgaaatgacgtgattcttctcatcggcggtcatcatcaggtcggagaggctttggcgtacacgatcgaagagaagccgacggcttttgctctcggatgtttccggtgattgggatagttcctggcgcaagagtggcggtattagtagacgccgagtagacaattagacgaatcgcgcgggaagctcaccttgggcaaaacatcctcccgaatcacacccccaacgataggcgccgggtgtgggggatgaggaacgggctgcgactgggaggagaacttgagtaattgcagtagattttcctcgagagcccacgccttcgcatcaacttccttgagaagagagttgtggcgacggaactcgcgcggaagcgctgttatcgcatcggtgaaatgcgtgagcgcaggatagaagccgtggggaacagggggcgtggaaggaatttcagctgtcgagcttccgccgaacgcgaaggatgaccgtccggtggttttggagattcgagacgggtttgtacgtgtctgacgggcggactgtcggattccttggcccggcgtattgttgactgacgacgagacgacggacgtcgtgaagggcatagttgttgagactggagctgcgccgttggaggagagttgaggtgagcctaccccaatttgaggaggaaattgtgagatctgaagaatcaatggtgttcagcaatgacctgggaccatggacaagagtcaacacctcgcgtagcaacaaaagggcatcgatgcagaagaaactactgctgaagtttgcgtgcggagaagagcgattggcaatcgaatcaggtgatataggtgcctgcagcattaatcaggcatcagttgctgaatcatccgagcatgtgggtgacgtcatatcaggaacatcgcatacaatcaatgcaattaatgcaatgcatgtgagctacggtgatttgttagaagtttactctgtagaacattacaaattacaattaatgcaatcgatgacattataagtggaaaataaatatgcgtctagtcaaggattctttgtattttacatatagcgtgaatctaggtatagaaggagaccttgtattaggacaaccaaaagactgtcctagcatagcatgactatgaacctaggacacatctaacacacaaaggaaatcagaacaataaaaagaggtagtacaacaacgaattacacggtaggttctaggaaaaccgatgaatatatgacacccaactcaatgcaagtgtcggtgcaagatgccaaatatctcatccacagaagtcggatcaaatcgctaaaaaggcatttactcgttcttcaggtgatcctgttcaatagagaaagcatcctcaaggaactcctgctcctccttgaggtggacggccttgagaccggtggcaacggaagcgctaggagcgcgaccggcgtacaggacatggcggcggtggtggtgctcggtagagttgagcagggtttcaagacggggctgggtgtatgaccaggaaccggcgttgagaggctcctcctggcaccagacgatgttcttagcgttggggtagctgtccaagttctccttcagctgagcccaagggaaggggtgcagctgctcaacacgggtgatggcagtgttggtgatcttgttggcctcgcggtgcttgatcaaggcagcgtagacctgtccagagcacaggataacacgctcgatcttctcgggggcgtcgatggcggcggcgtcatcggggatgatccactggaagtgggactcgccttccagggcctcgatgtcagagcgggcaagggggtgacgcagcagagacttggagaagaagatgaccagaggcttgcggaactggcggtggatttggcgacggaggatgtggaacaggttggcagggctggtcatgcaggcgatctgcatattgcagtcctggtgctgacggtccagcttgtcggccgaggggaacacacggggctcctcgttgcaaagctggagccagcgctccatacgtccggaagagtgctcggggccctggccgtcataaccgtgaggcagagacacaaccaggccggaacgctgcagccacttggattcaccagaggcgatgaactgatcaatgatacactgagcgttgttggcgaaatcaccgaactgagcctcccacatcacaagggcgttgggggaggtcaaagagtaaccgtactcgaagccgagactagattgcatgttagaattattattacgcgggggaagtcgacttcaaaaacctaccaaccgtattcgctcagggaggagttagagatgacgaagcttccctggttctcactgacgtggtgaaggggggtgtaagtgctctcagtctcctggtcgtgcaggactgcgtggcgctgggagaaagtaccacgctcaacatcctgaccggagacacggacgtggtagccttcctcaacgagggaaccgaaagcgagagcctcagcagtggcccaatcgatgttcttgccctggtcaacggccttcttgcgtccacccaaaatacgcttgagattgtggtggagcacgaagcccttgggaacaccgtcaccagagatcaggtcaccaatgtgctgtaggttcttggcaggaacagcggtaggcaggtgaggcaggacctcattggccagctccttgggagacttgaagttgttccaagcggaggtcagccactccttaccagtgggctggtagtcatcgctgcgatcgaagctgtcggcgagcattccccagacccacttcttgtgttcatcaatgtcctccttggtgaaggtaccctcggcaatcagcttatcgacgtacttgtcgagctgaggcttctgggcggcaatgcgcttgtacataaggggctgggtgaacgaaggctgatcagtctcgttgtgaccctgcttacggtagcagaccatgtcaatgacaacatcactcttgaactcagcgcgccagtcggcagcgacctggcagatgtagttgacagcctcaacatcgtctgcgttcacgtggaagacaggggcgtcgatggacttggcaatatcggaacagtagggggtggaccgggagtaacggggatcggtggtgaaaccaatctgattgttcacgataaggtggatggtaccaccggtggagtaggcagggagagagtgcattcccatggtctcgtagacaacaccttggccagcaaaggcagcgtcaccgtgcagcagaacacccatggcggtgtcgaagtgagactcgtccttgttgtagtgctggatagcacgggtctttccaagaacaacagggtcctcagcctcgaggtgagaggggttggcaaccagagacagctgcactcgcttaccggagggagtagggcgctcaaagttcatacccaagtggtacttgacatcaccggagccctcatcagaaggctcagtagagccggagaactcgctgaagatggactcgttgggcttgcggacgacgttggacaaaacgttaagacgaccacggtgaggcataccaatgacgatgtccttgataccgtaatcgacgctgcgatcgatcaaggccttcataccgggaaccagggtctcgcaaccctccagaccgaaacgcttgtcgttggggaacttggtagcgaggaatgtctcgaagctggaagaccagatcagacggtcaaggatgcgacgcttgtcgtcaaccgagtagctgtaaggctgggggacctcgaaacgatcacggatccactcgcagggcttgcggtcgggaatgtgaatgtactcgacaccgtaagagccacagtagatcttctcgcaggtggcgatgatctcgcgcagagtcatggtcttgcgggtttcggtgatgaaacggggcaagataccgggtccaagggaaaactcctggtccaaatcacgctcagtgaagccgtagtggtccaactcaagctccttgggcttgtcgtagccaaaggcctcggcctctccgcgaatgccgagagggtcgatcttggccttgtggtgaccacgcgcctggtaggcgcggcagagcaactggaccttcaagtggttggtgacgtcagcgccagcgtggaggcccaggccgggcatttcctggggaacaccaccggtaggggtggggacaagggtagggggaggagtgaaggcctgggagataggcattttgccctcttccatgttcttgaagtacgcctgccatgagatgtgaacactcgaggggtcgttcttccatgccaagtacatctcatcgatgtaattggcagtgctgccagtaaggaaagaatcgttggggtcctgttcacgtaagagcgatcgcgccgtcgcattagtcgaatgcccgttgatatatttgaactaccggggaaaccggatcggattgacaccgatcatgaggattgttgttgcttaccactccttgactaggtccctccgaggaggccgcataggaccgggaaccgttgaaagcacggtcgacaacagccataggccgacgggcggccaggctgaagccggagctttttgacgtattgcgagcagctgtggcgaggtggaatgaacgccggcatgatgaagaggtcgcaccacgcagcatgccgctgttggtggccttcaaggcactgtttctgaacattgcgggattttcttggatcaaggtccaataaagtatttcgaatttagaggagaggagaggggaattgggaagacactagttcgtgtttctgaccaaagagacgtttcagagtcaggttcactgtatgctatcgtgttagcctcgaattgccaggttgtcctgtagtgcgagcaagccggaatacggaggaaaggaagggacgtaagtatacgtacgaattaaatcacaaatcaggtgtcgactagtattgccgtagcacctgtatagacgcgggactcatcagagagctacaacgctctagataagaaaataaagttaggggaagtggtagaagaaagatgaagcgagagaagagcgcaaaaggatgagctgccgagaatgacgggtgtgacggcagctgaagctggtgtgctgagtcagcccgagttacagccgatgcaggagccacctatctagccctttcgaccctttcgaccactttcatacgcagaacctcgggagagccccgaagatgcccactgctttccgtagccggctaaagcttttgggctgttgtccgggaattttcggcccaatggcactggaagtgattgcgattacatacatctccctggcttcccggatttccctgcttttccagcgccaagtctttttctggctgtgagatctggttgggatcggaattcaagctttgtttctatcagattgcgatcgctattaaaattaacgtatgaaccgacagtcgataattcatgaaatcgtcacaccgcacaatggccatatgcagagaaataatagatcgttagagccagatttacggatgtcaggcaccatattacaagacattgagtcgctgaggtccactgttgggaatttcttcagaatctggccgcccggacaacggcgaagtagtacgtggatgactgtcgtcatggaaataaccgacaccattggaaactccctcatcggggctgaaaggcctcgtttcagagaccgttgggcttgcttcggcaccgttgaggctggcgcggtgagagggcgacagcgggtgcggtgggggactacctgcactgctgcgtaggctaccgttgctcccgccccaagccccacggcgtagcttcatgagcgcgcccagggtcatctcatcgtcgagactgcccatgtcaaccagctgcgccagcccggggctcgctagagctgaatttggatgcgtactgccgtgggccttgatggaaatcatagagttccgtgtgctccattcgctccgttcagtgataggggtcaaactgggttcttggaatttcccgcggctgctgtggttccgtgtgatgccttcgacccgtcgcggaccgaagtatccaccgttggttagctcagaggcgccggtgccatctgcgtgtgcgtagaagccgaactcttgaccgtagaagccatcgtcgtcgttctcaagagcttcggcgttagcagcagcaacgatggcatcgtcaaaatacgaatcatcgtcatcgtcgtagaactgatcatcgtagacctgatcatagacgttgtcaaaggccatggcatccgcaggttgcccgacccggctgtcatcagaaatcagacccggttgcgagtctattgtcggcgatatttgacctgtgctgtcttgtccctcggatccttcgctcgtgccgaactggcgctcgatccggctactatatgatgcttcattggctgcgaaagctagagcattgtgcaaaatatctagattttgctctgtgagcacacctccaccatgggcacgaacagggcccatatttggtatcggctcgccgagaggaccacgcttgattgatcctgtgacccggtagtcactagccacactaggcatgtgccgcagtgcttggtctcccatttctgccatggggctttctttccccgaagagtcgtccccatcagggccgtcggggccgtcaggggcgtcaggggccgcactgtccgttggtatgggtgctgcagggggagcgaccggttttctttcgtataaatgactggttacgtcatcgaatatagattcgtcaaatccactatcttggttatcggcagcaagatctccgaaatcgccgtcatcaaaataaagatcatcatcgtcgtcgagaattggagccgcttgctttgcaaccggaacctcgggaaggcttgatgtcgcatcagttctagcagctagggacggctgttcctctggtagatgttgctgggggccatgatctagttgtgtggcctcggatagacgagaggctgagtaagatgggttttggtttgggtatggcagtgcagcagtgagcgggctagcaacagtaagcgggctagcaacaatgggtgacaaccccgggacaacccaggacttggccttgttgatatctcgcggaattgagaaatcatcgaaatcgtcatcggcatctgcattgacgccagggatcctttcttccagaccatccaggtcatccagcatgtcatcatcgaagtcctcgtcgaagtcatcgaaatacccatcctctattttgcgggaggcttcctttgccttgtgcttctcttctagcattctctcttgtgtagatgattccactccgatcatatcgaagctgaatcgggacgcattgctcttgagatgtctcggcaaggccgaggggttgaagggtacattaggaatagtatcttggtcttgagggtgctgaggatgagcatgcgagattgttgtgggtgatattggaggttcctcggcctcatgctcacgctggtccgaaccatctatagttctgtctggtagatgtgaaggcaagttccgcgcaaagaccggcaatgagctatcataatcaggctgcgattggcctgttaaaagtgaagactgaagataccccttattttccacctgtagaacattctggtcctcgaaatgttccttgaagacaggcgaatgatcactgtgccgtttcgcctggtcattccaactggcgccacgtggttgactaggtatttgcggtggtgaagtatccggcccattcagtgtatcctgctggggagccgaaaggttgcggcgaggccgaggcgccgagaagtcatggacaatctttccacgaattctaggatcatagtcatccggcatcggcggaacattccggtttttaattttgagatcttcagcgcgggagctaacgacctgcgaggagcgcctgcgcgcaagaagagacatcggattcaggagatggagcatcgccttgccagacttatgatgtgtctgttctacagacacatcccgatccccagtgcgccggacggtcgtgctaccctccatcttgaaatccctctgtgtcattgtttgtttatccgccggcgaagcgtccggcgaggttctgaaccgaaaatggcccgacgccgttggcgcagtcggcgatcgtttctgcttgccgaatgaacgtcggaagggcgagcttgatttggaattcggctctgcgtctccttgatcggaccgtagacccgtcacagacagttgtgaattattcgactgggctgtaaattgttcttcctcggcgttatcaggactggaatgaggacgacactctttttcaaatgccggcgatggaagagcaagagtaatggaggaggatatcggcgcgacggatgagctgatgttcagcttggaggtatctatgtccagcggcgcctcgttcgaagaggggccatcgggtgaggggtgaccgtcgagggcagtggtgagcgtcggtgtatccggaatctgtggaagttggggagggcttttaatggggcttccattcgctcccttgacaggtgagggcgcggggatcgaagcaggcgacgcggacgaacgtcgatggtctcggcgccagtacgaaaagacagtagatggcggcatggcagttccttgaggccctcacgacgccaggttgagtcgcgcgtatgctcaagcggcgtaatagtccattacagttatcaactgcatatgctaggtgaacaaatacgctgtcatatacagacaactggaccgtggggagatgcaaaacccacccgtgggattccaaggttcgtaaccctcaagcttttgtaagcctattaaactcgattgcacgcaaagaaggggtaatccatagcaaattgcagtaaacatctcgatttttacgtttatttatacaaaagacaaagatcaaagtaacgcgcggctaaaagtgaggttacacccatcctgctgcagtgtctgggcctttctacaatatcgcgtcacattcttgcccctactgtcgtcttcaatgttgactttttgctgagctgggcgcatatggttaaattccccgaaatgtatgcagttattcccctgtaaatcgtacagctaggctccgtagatatccttcgagaaaaataaataaataaaagaatgacacgctcaaacagccatatgctatgctaacggacaaaacataaagcaaaaattaagtgataacgctttcaacgaatgctttgcctccagcgatcgatcacctcagtcttgaccgggccagggggtaccatgtttggagcataccccacgccattcatgcccatcgtcgcagggttaataggatacccatattgttgtgccatcgggtatcctacaggtggcggatatcgcatttgtgtcggaaactgttgcatggacatgcgattcccaaactgggacatggtgacaggccgctgattgaaaacatcatacgacgactgacgagaaaggtgggagggacgaccctgtgtaagcgcagccatgctccggcgcattcgcgggttctttggagccgctggagcagcagcggcctcttttctaaggcgactgcgtcgttgtgcgagtgtctcttcctcgatgggaacggggacttcttcgggctctttaggcgcaactccagcccgggtgtcaatttcggccatcaagtcgctggcgaacttactctccgagcgtttatgtcccttcaaccgttgaactcgctcggcgagggtctctacctctgtttcatcctcgctctcggcggccggctcagggacatgcgccgggggctctgcatacattgtaacaggacgttgctccggccgcgggattggttcaccccgcaacctggcacggcgtgaactcagaggctcattttcttcttggtgccgcatcgctagcagccccaaaggtcgatcttcttcgatgttggttttctcggggtacagcatagccaggggaacatcatcgtcatcatcccgtccttcccaggccaaagcgacaggacgttgccgccggttatcactttgcttttgaaccatatcgtccatttctaataaagtggaccgcataccacggaaaggcaccggcacaattgtccgccgtcgatgcttcaactcatgtttccgcaattccaattcggcgatgagcgtattcggtggaccaacataatccataatatccgcgtcgtcagacccctcgtcttcagattcctcactttcgccatcagtgccttccggcccacgctcatggccgtgctcatcatcatttctatctgagtcgtccgagccatgtcgcaaagtggcggggacctcatcttcttctacattattagtgttataagactggccaaagatggcccgcgaaagacggtttgtcttgtgcactgtcgggtcttttgtcagggtcttgcgttttgacgtgttgtagatgaacgcgccgacttgaccagcatatgggtgatcggtgaaagccgaaacgggtgcattcgcagaggcgtccaaaatactctccagcgtagcaaccgcggactgttgtttgacctcgacctggagtgatgtactcggctgatcaaaaaatacactggcacggagatgtggtggcactgtcgatttacgtttatcgttatggctatcgcgtgagtctcctaggacggcgtcgggtagcccaacagttgactttctatcctgagcggcgatggcgcctgcgatttgtgtacgacgcttatcccggtcgatattttccctgcgtgacaacttcggtgggagattcaacatgcgtgggacaggcgcgggataaaacaccatattctcccctgctcgcgggttcttgtaatggtccgggttgcgggcgagcggcggctgctccagagaaacctggcgacctggttccaagggtgtgaaatggacgccatcaaagtcggtgaacagtgtccgcgcctgctggtaggtatcgaatgatgcgaccgaggcccggcgctgcaactccggctctgcgggaactccttgtgggacatattggtcgtaatagtaatcgctctgggtattgaagaggggctgtgccggtgggagatcagggagcccagggaattcatccacttcaggctcctcttcatgtgcaggctccgcaagctgagctagacgcgcccccgatacggagcgctgacgcccgggcgacgcaattgatccatgggcggaggaaattgtggctaccggggagaatgcaccagtccggtggattgaattggacgcggaactgactgagcggcgcttttgctcttgatccatgcgacggatctcgctctcaatgtccgcggaggacgagctcagctgctccgcgctttgctccaaccgcgtgacatttcctttgtaggctccttgtatcgactgcaaatccggggtagggtggctgagaggtacgggaacctcactgcatgcgctgtgaatggggcgctccggagaaggatttcgcgcggtcgtattgagtggtgggatacggaggctgttggctcgctcctcgggggaaggatcggcgtcatagtcatcatcttctactacatcgtagctggcagcagtcatggagcggatcatcgaacctaatcgactgaaagtcgggttctctgtagttttggcagtttctagatggcttccgcccccgatatgatcagtatcgagcggcagctgctcaaaggcatgtttgtgagtgggcgagggacagggcgaagcggaagcggaagagacagaagccacctcgtggtcgagctgagcgatggcgttgtacgccataatataggtcttagtcaccgactacccatccattcagatcgattcaaattaaagaagatttcaggatcaaaggaactcggaataccagggataccagacaaagaaacgaagccagaagagatgtagggaaagaaacgaaaaaccaggaaattgggctgggggatagcggctaattttggaagtttgctgtcgtacaataatttgccctggaatgccaactgagctagtaactccatgctaataatatatcgatgcaatttcctcctaaaagtcccccaaaagcaaggaatccaaagccactaaggggcctctgcgtccgtgtcttagaccagtcaacacgttctgcgcgccgagtcaggcggattcgactctccactctgctctagaggtcttggcgtttccctatatctatataaggagtccggaatactcggtataagaagtataaggagtgtctcaggcaaccccttaaccccccgccattcctctacttcgctgcctttctacaggcttcccgggaacatgcatcaaaaggaaacccaaagaggcaatcccgaggtgtatctgcatctgagctagaggacttgacaaccccggaccaatcagaccatcaacagatatcgcggcctcaacttttttccatgagttaaattgcgagttaaattgctttcgaggtttaccttgctaggtctgaccagtgagaatacatcgattagggttggagactcgggtcgcgtgacctgtcaagttcaatggctccaatccaactggcaccggtcacgtgctgatagcattatcttatcgcatacctacctcatacatcgtctatcctgtcctctttcctatcaccttgtcaatcacttatgagatctgcatcttttccaatcaactactcatcatgccaagcagggacaggagcagatggcgcaatgtccatttctacaacgcgtccaacgacctcctaggaggtttctaccaagctggttccataaccgacgctaacctgatctggattctccggagcgtgttgctagttcaggcggagaatctcacgataaagcatcgggcctccgatcgaattatcacaccatcaaataactccgttgtccctggcgactatgtcatttcctgtgatggtaagacttcacgtatcactagcatacggttataattaccaccgttcgactaggaactatcagggtaacggacgaaccgtggtttgctcgcgtgatcagcttttctgaatcgggtcgagaagattcatttcgtactgaggtccgccagcgagacgggagatgtgttatttccggcgatatcaaccttcttgagccttgggatatatgggatggtctacaagctgcccatgtattccccctggaaaaggagaatctatggactcagtataacttcgggcgttggatcacgaatatggaccatacgacaggagtttcgaagattaactctgttcaaaacggtttacttatgggtgcgacactacacggttgtttttatcagtatatgttctctatcaaccctgatgtacgtttcctaatgaccaaatccctacgcagaataagagacaggacagatataagattgtcacatttgcaccagattcctacagaatcaatggaaaagtccttgacccgatctgccggaatccaaacgacctaaaccatgtcgcggacgagctcctaagatggcactttcggcaaagcgtgctcgctaatatgaggggggccggggagccgatattcgagtcggacttcccccctgggacagatcaaatagcgacgttacgagacgaaccatacggcaaggagaggttgggaatggagtttgaactcagactcggacctagagccaaagaagaagaagagtcgacatattaatagggacatcaacaactactagactcgaccgtgatgtagcttggttaagcgcaatgaggaggtttttgtatcactaccctgaaatagtgctaattcagcatattattagtgctttcttcaagtcccactaggtgagggttcgacgataatgttgtaacttgtggtctactactcctagtgaacgactttgctttcgccctgtttgtaggcaggccgtgtcggtacccctgctgcatccgttgcagcataaattactctttcttcttttttgcaaagatcaagaagttctcgcttccctgttcttctggtgggggcagtagaatgtggagaattgaaatatggtacgagctcttgatacccaaaggatagaatatacatattctaggacagcgtgttcatcccggctgtctgccaagcaatctcgtgttttcatcctcaattcgccgtttgtttcgccgatcgcccatgtggctcgtatacatgtggctcgtatagctcgaggccaaggtgaagaaacgggactatttttggtaacatatctggatctttcagacctcacgtcgtattcgccccggacttttcatacagaccatcgttttagccccagagtacggttgatattcagcatcttcatcgtattacgagaaaatgaaacgaagaaggcctaattttaacaaattctccgcggcgctcagttccacgttgatcagcacctggtaaagatccacgcatcagtcaaggtataagtatcctagcccggcctgatgcacaatattctggttacaaattcaaagacattcaaagtttcatcgtctctcgtatcaattcaaagctctatcctcgaacgcatcattgaaaggaaacgaagtcctcagaaaaacacgcaggatttgcctactttcctaactcgccattatgcgattcacaaacttggctctgaccctagctgcggctttctctgttgccaatgcgtacgccatcactgccagtgttgccaactgccgtactggtccctcgacgagcaatgcagttgtcacgacatacaaaaaaggtgccgatgtcaagatcacatgccagacttatggcgaaaacattcagggaaactctatctgggacaagacatctgacggctgctacgttgccgactactatgtgaagaccggctcaaacagcatggtcaccaaggactgtaacggtggcagctctggcaccggcagctcttcctacaagggcaagatcagtcgcaaggagatcatttcccgcggtcagttctgggtctcccgccacatcccatactccatgaacgccgaatacccggacccccaaggccgcaaataccgcacagactgctcgggcttcgtcagcatggctttccatgcgtatgcgccaggatataacaccgtgagcctcccggatattgccaagtccatctcgtggagcgacctccggcctggtgactttgttggaaccctaggcgctggtactggcggtgctgctggccatgtcactctgttcacttcgtgggccgacagttccaagaaggagtacaatacgcttgagtgccgcggtacgtacggctgcgttgcgtacaggcgccctgttggttggaaggttggaagtttcacggccaagccctacaggtacatccacgttgtggactaagctggagcttgtagcattttggggttgaacggtgatgtaaccaattttggtgcgtgtataagtgcttgcgacggctgcggtggttgggtaagcggagggatatgaatagcttcagatgaatttgtgagcagatcagctaggcagaaaacgaagaaaagatgaagttgatatactcctgtctgttactatcttaaaggatcggttggtagtacttgctgttcttgcctaggaaggagaactttccttcctaccgcgtaggcgagcgtaagcgagtaaatcctatttgcatggtttgatcgaagacgcacaaatgggtttccatttttcctctcttcgtcctttttattctcactttttgttccgatataacctggccaataacactgtatggcaggacaatgctaccgtagaatctggacaggtccagacaaaaagttgttaggaacgtactcttcaaagcaatgatgatgattctttaatcaaatctatgtgtcctcggctacgaagatttacacccctcatgtattccgtgggacttgtcaaatggcaatgagagccacgacttcaggaacgtccacgggaacgcccggtttgatatctgatgcagacctacttggacctcataacaatggtaatgttatgatccctgtggtaggtgaagcagcatgtgctacgggtccctctgcctacactgtctcgtgggctacggtgagatggtggtcagagagatggggaggagagaagaagaagagaagaaaaatggggggaagggtccttttatacccccaacccacgtgccttcctaacgtgtgccaggtccctcgtacattccctgtcaatgtcaatgtcacatgcattgtgccttatttatttgccttctttgtttacacgcggtccttcgcgaggcattaccgtttcccaacttgaatttctacttccagtgctctgattgtcgtacttgatctttatttcatccacataacttgacccgtagctttcatagcttgaatgaaccagaaatcttccaatcatctcccaaatcggttcctgtcttctatggaggtacaacgcccggataaagatatatgtctatggctcgattatagtaatggtctatcagctctttctggggtacttcttcacgtgctatccttgagcatataggagaagacaatccttttcataagcgcttcatctccattgctagcagttttacttcggatactccaagacaacctttcgagtcttgatgtggatcaagacctcagggatctagtatgcaaaatgacaaacctagatctcaagaaaaggatcaccgcaatgcaggcacttcagcaccgctggttcaggtcgatttaagaaaactcgcagtataacctgggataagattgtgttcaattcttcaacattcggaactatatatggcaaatttcctaattctggtgtgctagtgacacgaaagtactccgtaccaaaaacaacaactgttgaaacacgctaatcgggttgcagcaatacaatttgtttcaaatcgtcacaatgttgtccatcctgatgctaacgacgcctggtctgtagtatctgcaggggactctgcactaaggcaaacatgggcagaggtagaggtgccatcagtttagcacccggcggaagtgccaagggtcgtcgggaaatattatgccggtttcgctggaaattgactgcaattacgctttattctttaagatagcttaacattcacattctcatccggggcactgaggcatacttcgagcaagcattccacgacagggcgcatatcctctttgctccttggcgagataaagagccaggggtatcgatcatgagatgtccgctatatctgtgatctgaatttagcagctgctgcagctgctttctctaatggcgatgtttacggcataaagggaaaatctaaaggtggtatttcgcgcagtctgaggctcttctaagaaaccgccgagtcctgtggaatattcgggttgaaggcacggtttgaacaacgtagtcaatttatgagaagtgagggggattgaagcgaaagtcgggcagtcatacatgattgtatcacatgactaaaacgggtgcacgctcactgccacaccgagacttcatcgaatagagactcattttagactcatttatagttaggcatggaaagtgagtgctacggtggcgggctaagacaacacggctacagtgccaacaatgattttcactcaacgataaatcgcacaagtcaggtacattttatggtatactaataccattggccagatcattcatttataggctgcagcctcaaaagatatataaaagacttgtactctagtcgtatacaggaaatagcaaaattagaggtggcggtgacacactagcagttaaagaccgcagagccttaactcttgaccaacggtactccaggatggggccggcctaacatccgccaattaggcggcgtctacataaaaacccaatatctgtttccttggaatctatccatttccccggtaaagttatcatagggggtttggtggatcgacggtgacgaaagagtggagcttggggggttggaatcaagctttgacatcttgaagggtttaaaaaccattgggacatcttggactgatagaattgtacattcttttctccatattccctcagcaaggtgcttttttttattgttattgttgtgatgggaaactcgagggaacctggccgggatggcggagtcaagggtatgatacaggtttgaagggattgctgcgagatagcaataatgctgatacaacgacagatgctgtggatgctcccgaatatgagcaaccagaaggcaccgaagaagaagcaagcaagaatgaaggcatgggcaaaaacccatcatatagtttggctggctctggcgcacagaatccaaacaacaaccaaggatatacagatgaagagtaccagaagtacgcttctcaatataacaaacaagatgatggcccgacctggagcttggctcatccactgccccatatagtccggcccggcatgcgtcacggcgccttgccagaggaccgaaaagaggatcgaaaagaggatagagacggcacgacagagaaccagcaggattcagcgcacgaggaggaagttcgcaaacagcagtcgtcagaaaatcgaacgaagaaggtcaacgaccccaaagaagacggctttttcaatacatggtcgaaaattcgccaccaacttcgtgagccgctggccgaatggctcggagtaagttttatcgatatggctcaaaaatacaatcaatcaagcagtctgctaacaagtgtctcgcacagacaactatggcaatgacaattggtctttgcgcgaccttatcaaacttcacttcctccggacaagccggatcataccctgcccaaagtctcgcctggggctttggattcatggtcgctatctacaccaccggaggtatgtctggtggtcatttaaacccagccatctcaatctcgctgtctgtattccgtggattccccgcgcggcgatgcgtgatctacattgccgcgcaactcctcggagctatcaccgcagggggaatatcatacgcgatctaccatgacgccattgttgaagtcgccagattggcgaacgtgcctcagaatgcaagtgtcgcctcgcaggctctcctcacgttaccgaaaccatttgtccgtcctgcgactgcattcttcaccgagtttgtcggcagcgcaatattacttggctcgattctagctctgggggatgacactaatgcgcccccgggagcaggaatgcaggcatttattattgggatcattatctcgattgtgatccttgcacttgggtataataccggagggtatgtgtcctatttctaaactcccgattctaagtgctttcgaagataactaatgatctgatagttgtttcaatggcgcacgagactttggcccacggcttgttgccctcatggctggatggggtggcaatatcttccgagaataccatgcatggtgggtttggggaccatggatcgcagacatcaccggtggattgtttggcgcattgatctatgatatggctatctttaccggtggtgagagtccagtcaactatcccccgcggagacgaaagcgggcataccgtgtgagagccttgaattttcggaagaagcttcgtattgggagaaaaaagctgcccgatcttgaacgttctgttgcagctactgagcaatgagctatgttcttctatctatgcataattattaattagtatagttactggttatagatttaaaagtgaaattactgggcctaagaatcttaggttgcttcatgtacatatattacagaataattgaggatatagctattcttcactcgctcttctctctgcaaccgccgtctccaaaccagctgttacctcgtacgcagcccttgggactggccggcaaatatgaccggaacaggccaggctggagttggccaagcggagtgcgtgaaggaacctaggcacgtgatatataccacagaagataaagcagtgttagaatttcaatagtcttcattgattcactgtccctcattgtgtcttttacaatgtctccaagagtattttatggagtctcgggactttccggtctacacagtcatctcggaagatcccgaatgtagatgtccctgcgatagcgattatttgaatcatgcggggtcgagcttgagaatataagaaatccctttttctgaattgcttcttaggttctgcaacacaatatcattttgcctcgatatttatttccctttattttgctttgattgtctcaaagtaaccatgactatcggaagaaagccgcgcgttgtttccctcggggagcctgcattcgtgggcagtgaatatcttactcaattcaagaccgaatttgactattccgtcctccctgcaacaaatcgcgaggaagcccaggtattgctacccaaagacatcaacgaaaatggaccgatagacgcgttcatcgttcgcatgggtacgccaccctacgagccactcgatcaggatttttttcgagcactagcaccggggtgtaagattatcacttctgctagtgccggatacaacgagttcgacgtggactggatgacaaaccaggaaattgtgttttgtaatactgtgaatgccgtcgctgaggctacagcagacatggctatatttctgatacttgctgttctgaggaacactacaaacgccgagcggagtgcacggagcgggatgtggaggaagggcgcaaacctggttcctacttgtgatccgtcgggattgacacttggtattgtcggtatgggtgctattggaaaggtgaatagtccgaagtccattgactcggagcgctgctgacttccttctcagtacctcgccaagaaagccgcggtcttcaatatgaagatcaagtactacaatcgacaccaactaccggcctccgaagaagcagcgtacggtgcaacatattgccagtctctacatgagcttctgcgcgaatcagatgtcgtctccttgaattgccctctgaatgcggcaaccacgaatctaatcagcgaagccgaattctccgctatgaaagacggtgtattcctcattaacacggctagaggagcagtcatcgacgaaaaggctctcattgcggcacttgagtcaggcaaggtacagcgggctggacttgatgtttttgtgaacgagccgagtccgaatccctactttttacaaagtgataaaatcgttgtgcagccacatttgggtggtttgactgagaaggcattccaaaaagccgagagagaatgctttgagaacatccgtgcttttttcaagactgggaaggcaaactcgccagtgaatatcaaagtccaaaccccctgagggtgatagactggttcagtgagagatatcagctcagttcagtgcttagctagtagtaactctaaacaggaatataagattattatctactcagccctccttatccgaaacaaagtgtcaatctatagaaatagctctccttcgctatcgttcattggacttcggattctcccggtatgttatcaggggcggtttctcccgattcgcatttgagaatattcgatctgaccacagattgggttagacttagtttcgcattgcttaaagtgcgcgcaagtcgatccttatgtgggaaatgtggggaatgcctggcaacatccgtactccgtaattgtaagtacgcgacaatgaggataggggcgaactctgatagaccgtcaataatgcagttatggacttcaaggtgtgaaagaatgattgaggggtaaatgttagatcaagtcattggtcacgttatctcaaccgttttatctcccccgcgatattgtcaaatcaacattgtgtctcattccagcattttgaatcatgagacacgcaccaaagcgaccaagagtcgggaagcggacgatactggcttgtatcgaatgcaagcgcaagaaactaaaggtcagggtcgcccgaagagtgaaagagatacgtaggctgacagatgattagtgcaatgggcaaacgccgaaatgtaaccattgcctgaaaaatcaacatggtacgtcaattactcttttgggttggtggctttatctgatgtggcgcagaatgcctcgtggaagaccctgccacagggctgcgtcgcccgcgtgactacatgcagtcgcttgaatcgcgtgtagtttatctggaagcgcttctccgagaatcacgtccagatatacctttgaatggagataatcagcatgagctcagggatatcgagtctaatactccgtttgttccaacaacctcggcccaggcaccggaagctccaacctccagccaattacaggactcgccgggggcatacacgagtccttcctatatgcaagaagcatcatcatcatcatcaattccaaaagagcacgccgggcaggtcgaccatctctcttcggaagttgccctactgtgtctcaatgctgcgggtggtgagccccactatttcggtccttcatcggcggtcttattctcgaggatcattagtgcaacaatgggtctcaaaagcgagaaatcgtcatcgtcgccgcgtacttttgaaggctcggaaagaagccatcctaatgcacggcctgatagagtaccaggactaccatcaccaagtgttgcggctaatctatcgcgggcttatttcgataatattcaccctcagtatccttttctccaccgaccaacattctgcaaatgggagctggatgtttgcaaatctagccagtcggtacacaatcctgccgccggagaggttccactatttttcgtccttatggtatggccacctccagtggatttaagatatgatctgacgatattgacttatcacaaaggtctatgcaacaggctcccttgtattgaatcaaagtcagcacggtgccgcagcggtatgttctacttgaccacttgcgtattcttgattgctaacgctatcagatgtactattccatggccttggattacctcccctcagtccttgcacttaataatctggaatcaatccaaagcatactatgttgcgctgtgtactcaatcagatcacctactggggccagtctttggtattttcttcccctatccttgttccaactcaaactataacgtcagtaataggaaaatatcaggcatggccattcgtcactgtattgagctaggataccacagaagcgcagaaagatatcgcaaacatgttgatcccttgacaaaggaaatgtctagaaggtgcttttgggtcgcatacgacattgatcgtgttgcagcttttaccctcggtcggccaatgggtatcccggatgagttgatcgatgcagaggtatgatataatctgtctaataccttacttcgatcttttaacctcctataatagcttcctatggatattgaagacgagaatattactcccagtggcctgttggcgaacccccgtgctaccggtaaccaggtgccaacaatcatgacaggcactcttcatgttatcaagttgaggaaactatgggcaaaattccatgccactctctattcacctcaattacaatacgccagtacgggtagccaatttgccactgttgacactctgcgccaagaattggaagaatggcatgcatcagctcccacacacctggactattcatcctctcatcctttatcggtgtttgcatcaaatgaatggttccaaattgcctacaatcattcaattctgattctttatcgctcacatatcactagaattctgggtgaacgacagggatctggcccaaacgagtcgaacagcaccgacttcattgaagaggaagaggacctccaaagagcattcgaaaattgctcccgctgtgctcgtgaaatatgcgtgctgtatcgtcggctataccagaaatcaagtgttcaattcacttggggaagtctccatattctgttccttggcgggttgacatatttgtattgtctctggcggtcatggcgaatacgccagcagactaagcagagcgagatattaaagacatgtatggcctgcacaacagtcttggtcattatagctgagcggtggaacttggccacatcgtatcgcgatatcttcgaaacactctctgagaaaaccatcaacatgatctgcggaaatgataagcttgctggaccagcccctccacagtcacaatggactgccccttatgacaatctcctttccccaagagactggagtttgggctttgatgatttatccatgcctcaaggttccgactggtttattcaagagtttttacaacagttcccagaatcttaacctgatgaaaccgaactaagagtcgaattgcatgtactcctccaggatttaaaggccgctcagttatactcagtgaatgaaaggcggcaaggtgtgggcaaagctctcgtgcggcctaaaatatattttgaacgtacgaggtcgtctagtatgctatgaccatcgatacacgtcatagaaatcgttcgaattagtttagtagtgtggactaccatagttctgcgatccaaattaagcggcggctagctagggtctagggtagggacttataaattcttccgttgaaacctttcctttctttctcctcaaattctatcttctttctgatactaaagcttaccatacaagaatcgttcaatcgtcactaaaatgtctgagctatctgttgaaggccaagagtcgaaggcagtcccctgctaccacgaccaccctccgcaatacgactcatactatggaagccaagacttactcacctctatcattgagaacgagcatactgtccggaaattagccaaacggatggatgagttgaacacaaagataacggagatagccaacataagagaggagctggagaagaaaacattcctggaaactccagcttcgaatcttaccactgctgaagattttgaggagttaagcggggcattcacagagatagcacagataatgaccgggctgtcaaatgcttgcaaagagcgcgccgttcacaacaccgatctctataaggccatcggaaatctcaccgataacgagctcgagcggacttatgattctttaaagcgagacccagaccggcagatccgacatgagctggctcaggaccacaaagaccgcagcgacagagattcaggacacaatttacaatgctcttcgacgaccaatccagtagagcgagctggcaattgcacatacaactcttgcagccggttcgccgagcccttagcaacgatggacaatatcaatgagaaacttccatccgatacggccaatatctcgaaagtggccgatgatactaccgcaaagtcacccgtgagtttttggaagaaatttttcagacgttcagctcggccttaatagtgaagtggaatgagggtttctgaaaggatcagattatgagatgactgatggatcttggtctttatcttgtctggtaccaacttgaacgattcatgcggatgtatatactgccgatgattaggttgtttctgtatggctgaatcaaatttgttctacaacctttcacacatcttgagatacggtcgaaatgtctaatactcaagacttggacaaacattttcttttcctagcttatcatgatcacaaatcaatgaggtctaaaagaatctagctcccgcggacaaagagcctacagtgagcagtgaaatatatgtccgagagaaaagtcaaggtaccctaaggcaccgacggttgaatggtatatatttcataatcacgtccgaagagggcttgtggaatccaaaaccaacagtcaaacacaggaaaaataaaacaacaaagaaaagacaacaatcaaacagtagacctccacctcacatctacacccagtttttcctttcatctcacctcactgaggttcccggagagaagcaaaaacagtcaaaaagccccagaggaatgccgcgaaagcacccttgatcgtacatccgttttcattcatctcacctcgctgaggttctcgaagagaagaaatcggacaaaacaacagaggaacgccgtcggtaccataacccctcatgcgggggcctcgccgagctgcttcaaaccatgggcaatggtgcgcccaacactggccaatgagttgctcgtggcggcgggatctttcagccttataacaagattgcccatgaacgaggggctctttggtgagggagccgagccaggcgttgcgggctttctgggggtcgcgggcccaggcgtcacgggggccactggggtcccgttagctgcaggcagggccaggtcggtatcgtcgggatgtcctcggccgcgcgggccggattcagattttggaggctatgccgcgagatgtcagccgatgtacgaagaagcccccggaggtgtttcaagaatcgagagctgccatgagagctcgcacgagagcttgcacgagagcgaacaggacatgttctacagggatcatggtcttnnnnnnnnnnnnnnnnnnnnnnnnnnnnnnnnnnnnnnnnnnnnnnnnnnnnnnnnnnnnnnnnnnnnnnnnnnnnnnnnnnnnnnnnnnnnnnnnnnnnnnnnnnnnnnnnnnnnnnnnnnnnnnnnnnnnnnnnnnnnnnnnnnngcgaggggacgacagatgtcacacgcaggaaagtggtggttatcatgatggtttcagtgattacctccatgatgagaattttgttgagaggaaaaacatcgagggcacgggaggaacatgatgtactctcgactaaatggttcgtgcctgccgaatttgtagtttcccattgcacgagcacagcttagtctctatctctctccctcaaagttaagaaagaagattgctgaatctgatgtagttgtgttggaccgttgcacacactgccacttcgttcggcatggtaataagcccacttgctttgacgatgtgtctgatgtgtgtagagtgatgatgtccattgtgatggtgtgtgtgagaggaagagaagagaggaagagggaaagagggaaaagccaataaattgtctgcgtagcttcccatgattagagtagttactcagaggatagtaaaatcggataaggatcgagtttaggtcaggccctaaaagaggagtctcgaatatagtgcttgcaaacacttacagcttcgtataatgctctgggagacaccataggcattcgaagctccgagaaggattgtgctccccgccagtagctgctattatagtgatggttaagatcggggtggtagcctatctcccggagaaataagcggtagtaaggagagacatataagcatgatacttaaaaccttggcaaattctactgtctaataatagggaatggttgggtaggccgtgggccgtggcaaaaagcaaggaggaggagtggcataatatacttgatactagatttatggcttatatactatcttttcaggtatctttttagatgtctttttaggtatctctaaagaacccttcagcccgatactattattttttcgcttttaaattcgtactttccacctctttggtacaccatctcacacgcgcaaagatcctctaatatacatcttcggccgcatcttttcctacaataggatcaagatacctgtaccccttgactagaaacttgcgatatagtctttgcttaattaagcataaccaacttatttttaacgccgagactccaaagtcacgtcataggtggtagaatagtgagtcgctatagcatttatactccattctttctagtagattatactacctagggcctatagttcccacgtgactgcatcgagatccccgataaggtcacgtatatcactgtataatcttacacccgacttgtgatcaaggcggtacgtttacgattaaggcgatcaccgttccccgagcaaataaggttatttcaacccgccgtatatcagacaaataacaaccaagcatttttccaccgagacaatccatatactcttccctgttgctaattgatgtcttggcaatttccgactctccaaaaacgggaccattcctgcttacgcgctaatctgctcaaaccaacgcaaggctgtggccaggtcattccagcatttgcccatgtatataaaagacaagatcacccattctagaaaatagatagttactagaggggctgtatatactccggattcctgattgcgaaaccacaaacgacatgtccggtatgacccccacagttccacttccagcatatagtctccatattaacagattgtgtattcagaacctcaagataaacccgcccctctccgcgtgggcgtagtgctgttcccaggcttccaagccctggacgtattcggcccagtggactgcatcaacgtcctctcctggagccacagcgtgacattggcacttctctcctcaaccctggagccagtgacaacaaagtcaccgttatccgccaacgctgtaagccaaagcgtcgtgccgacccacacgttcgcaacagcaccgtctctggatctgcttctcgtccctggtggtctgggcgcgcgcggctcgagcccagaaatcgaggaagcaatctcgtatatccgaaacgtgtatccccagctacgctatcttattacggtgtgtactggctccgggcttgcggcgcgagctggggttctagatgggaaacgagccacgacgaataagagggcgtgggcggagatcacggggctggcggtggatgttgagtgggttcctcgggcgagatgggttgttgatggtaaggtttggtcttcctcgggggttagtgctggtattgatgttactcttgcttggattgaggaggtctatgggagtgaggtggcggggaagatcgcgaatagtatggaatatactcgacatgaggatcctagtcatgatccatttgctgaactgtatgggctttgagggaactatgtgcctacttttgtgttttgtgtggagggtctccactcagttggggaaatgtatacagaaatatatcttctatgctgagacggtgtggcgtgtgcgcagtgccacgtagcgacacgcaaaattgcattgaccattttttagtcttatgtgggctttctgtgatcctttcaagggtttcatgtaaatgtaaaagggcctgtggcataacacgaggctcgccgtagagtatgaagcacatataaggaggcgacgatttggaagtgcccatttcccagataagcaactcggcctttccccccccgattttctagtgaacattgaattctcatagcccttcaaagatcagtagttgcggatgccatggatccgtttctccaccgatttcccatttcgcgggcacgtgatcgcgcgccgttatcgacgcgcctcaatctcacaactttgcgatccgaacatgaatatcccgacgtgtcatcatgtcttactatgatattgactccatcttgacggatgcacaggtgagttagtcgcgacccgcaaaaatgaaccattactaacatcgacccagaaactaccatgtacatttgagctcgaagtacccggactgggtattctagagggcaacgcgggcgaagatgcgagtgctctatttttcactatccggcgacacagattactgaccgatgcacagatcaaagccggaacccggatcgaccttccactatggctaggtgaaatgctctcgatcgggtaaggttcttacctagaagaccagcgtggagtttgttcttatttttaacatggtatttatggctgcagagcgcgtctaggaacggcccgcttggttacgctcgacatgcccgaggcgctctcggagcgggtgatgaacgcactgaaggccgatccccgcacagttgacttgcgcgctttagcaccgcatttctacaaccttagcgagcggattcttgaactcttcgaggaggaagagatggtcgatgttctcagtgatgtaggtggcattatttccgcgactattggttgagctaggattaacaggctcttagacattcaaaaaacgagcggctgagattgccgaccatgcacgcaactcgcgtggtgcggttggtggcggagttgagttccttcgtggactggatgagactgagcgacaatgtaggttatgattgtccttatttggatgggggatggccgctaacagatatggttcaatagtgttccgggctgctcatgaccgggccaaggacatgcggatctggtcaggagaggcgaaacgtaagtaatagtgtttaatagcgagacatttctctgggctctgagctgtgctcgctcaggaaagtgatacattctatgatcgatcggataggtatatgacagagtatgaaggatatgagatggctgggtggagtcgcatagtttaatgttgagacgttgacttccgaaggcgacggagtggagccccgacccgtcgaaagggaaatgtttatttttgtatagccgacctctgggattgaaatattgtttctcctttgtttccgtataggatgattgatatatacacccaagacacacacatcctgccctctatcccaacaccaaatccaacattcaggagaaaccccgcgcaagggccaggtgagacgcgccccacggccccggtccgattggccgtcgacgggcgagagagacaccaccggagtgatcgtcgcgttaaggagccgattgactggaatctagcctcggggctggaaaaagagaaaaaactatttagaaatcaccagatggggatctgatgtttcttccattcctggcctctttccattcttcctctcataacaataacatctacaacatacacaaacattcaaatctagtgcggggccctttcctctctttggagatcgactcgtcacaactcgttggtcacttcaccctcgcgtttgactgatcccaagtcccgctcctcccttgagttggcagcctgagacccctctatgccttgatttgggtctattgcctcgataaacctaccttgcactccacaggttcgattccagcctctgattgctccccacctgcaactcatctgcatccctcgcatcgacggcctgcgtgttacccaccggcgtccaatcaccgtccatatccgagggtccatctattaatcctccgatgcgggtggtggattgtgcaggcaattgttactgtggtgtctcctgattgactaggatattgcacggctgcatccaaacaggggaacggggggcttgacggcacgtcaattatgcgcgttcgctaaaacagtatgccggcagtcattatggatgagaaaacccaaagaaggagctcggccgctggtcagcttgctccttcaaacactcgaagtcccgtatatcatcccagcactgcgcccaaacgcagtgtttcctctaaagaccactcctctagtacgtggcttctaaacttgcttgaattgagttccaacactcagccttaatttaatcggagctgacattgcttcttcttcaagacttatcagaccgtcctcaacatccatcgctttctcgcgtcaaaggtcgatcgaatatgtttactccaccaagaatgagtccagaggtctcatggctaggagaccaatcgcctgttcaacggggcgcaagaaccccagtccgctcatccacatccggtatgtctttcaattgccatcgaccttggctgtagagcacaactgatgattcgtggctagaaacccccgaacctagcacccctactctagtaaaccctgcctcggctctcctgcaggatctactgaaagaagaacgcgcgcaccgaagctcccgaggaaccatatcggaggactttaaagaaaatgctcctctcactccggagaacactcgaacccaggaagaacctacctccgagaaagcccgcaaagcaaacgatgtcttctccgctggccagagaaaaccaaaagagatgggcatgcgggaaatggaccaagtaagttcataagacgcaatccctgtgcactagctgactcgtctaagtatgtctccaaaatgaacaagctgaatttcgatttgaagctcgaggtcttccaccgcacacaacagttggctatgtacgagaaaaagctggaaagaatggcggagatggaagaacaactagcgcacatggatgatttgatggcggaggtggaggagctacgaaccaccgagaaagagaaccagaccctacgtgaatctaacgagcaactccgcaacgaccttgacaagcgagacctggcggtgactgaagccgtcgagctcatctgccagttggaatcgaaacttgacctgctggagaacggccggggctccaggctgtctatgtcgcgccccatgaccgccgatggctctgaggccttagctaaagcccaggccatgatcgagatcccggagagaacctcttccaagcgaaatgcaagtgtcttgaacgtagctcagaaccagtcatcttccgagctacgcagactctcgaaagcaccctccttcctacgagcagataacaaaagtactgccactttgcggagcctttatgctcctgaagaagaaacccagtcgcgctctgcaagaactgaactttcgaaatccgagagcttccacacaaacaacgagatgatggagccggaatcaccgagactgagcgtcctgagtgaatgcagcgagctgaatgcattcgacacgcctatgatgtggcaagaatttgatcagctggagatcccggtccggagaccgtcgtcggtcgcaggcagcttggatagctatgtcactccccgagagcgggaagaaagcagaaaagacaagattgaccggtggatgcagtcccgcgaagacgtaagcgagaccattatcaacagacgcaggaaccgagtatcatccgatgctaccaaggcgagcgttgccagtttctcaccagatctatacgcttctaaacctcgtggacgcggacgactggacggatctctcttcggaggcatccaccttcctcccacccccgacactatgagcacggcatatgctatcggtgcaaaccgatcgaatgggtccgatgggagtattgcagcccggaagggctcccagactgaggatttgttcttccctggcagacgacttaatcgcccacgttctgctggagagatggcctgtccctacagctatggcagtgacattgacgacagcatgcaaaacaactgcaatgatactccgcgcctaggagtcgctgatgagtctcgcactatcctgccctccttcaacacagtttcctccaaagccagcgcgctccttgggcccggaagccccgacaaccctgttattgaaacctttggggatttataccacgccagtgcaaacgaaggatccactcaaacaatcaaacgcgtccgtagccccgccaaagctaagaccccagagccgcacagtgacagcgactcttcaccaccactcacacctcaagactgggttgccgctgcaaagcatccccggtctcgcaggcccagaccgcgcgacacccgccacgaaatccaacccacagatctatcaccaggcactgtcatcagtccagcatttgaagacgacagcagcctcgcttcaggttcaagcgagctcgaaatcaccggtatcccaactctagatatgagcactctggatatactagcgcgaaacctcgaacccacccagccaggccccaaagtcgaagccaagcacgagcatcgtcgacgtctcagcttcctacccccattcttcaaccgctcgagctccaacgcccgccaactccaaggctccccagtcttaaacgacttcgaagacgacttcgacgacggcgctccatccccagtaatccccaaaaccaggacaacaggcggcgcgccccgaagaccagcatcccaaataatcaccgctccaaccgagctatacccctccaaccccccaatccacatcgaagaaccgcccgcggccttcagacgcggattcccgcaatcagcaacaatgtccacactagcggaccacggcaccgaaaccctcgcgcgcccctcctcatcccaaggcccggaacacaagcgacgcagctcgctaggaatattcggctggatgaagagcaaacgctctgattccgggcccgggacggagaaattcacggactccacgtccaaagagaaccgggcttcctcgcggctagcttacgaaacgactcatggacttggaattcctcatggaaacacggactccatggagactcatgtcagacaccactccgagatgggtattcagtatgatgactatgcgagacggcctcgttatatgggccgtcgtacacgcaggggctgagtctctctcgaagctgtcatcacggccttactcttcgttctttattttcttacttcgtctctttgcctcggtctctctttgtctctgttttgcttcttcttccatttgtacttcatgatacccggccctgtataaacagtagcgtggctacattcctttgcatttcttttactcttcatttgaaacgccatggtgtattatgagatctctttgctttatcttatgttgttactttaacgtatatgaatcacgactatagccttcttcatctttcacgatttattcatcctgtcggcagggtctactgagatgtgttttatagtctcaccttactctacgtaatgatagttcgaaatgaacgaagattcaagaagtcaagtaataattcaatttcctttctcgtcacacgaggacaactagttgatacgaagtgacgggcgcaagctccggcctccatcacttcgtatcaactagttgcccgcgcagactcgaacgcccgcccccacgggtctccccaattctcttccttctcatcgctagacgatgggagcctaaggcccccggcccttcacaccgggcgcgacaacaagggttccgtacacatcagggtttcccctctagtaagagatgggtattagcaagtgcaccgatagagatggaagcagggatatgagaagtgacttacgatgtgggtctgcgcgaggtgccgccgcagattggaggccatgagtcttggcctccccaccttgttgaattctgcgcagtacgggcactggtacgcgcagggagcgatgatctaacgaagtaaaatgaaacgtgttagtgatgaaggatgaaaaagaaaggaaggaaggaagtgaagtgagaatttaggaagggagggtataggcttggggtggatgggatgggatgggatgagataggatggatgggatggaatacgtaccagctccgcgttgttcagaggccactgcgcccgcgggccgtggcagtcgcagagcagcttggcggtctctctgatatgtgcgatattaattagcttggatcaaatgaaagcacgtagacaggtgacatggcgaagatggaacgaaacttacgcgaaggcgtcaggagggtggctgctgtcgcgcgccttccagcggctgccctgggtagggctggtgcttgcagcctgggctgcagcggcagcagtgcttgtgccctgggtagtgccagtaccctgggtggtggcagtggcctggtcagtgccagtagccgggacagtgctggcagcagggacagtgctggcagcaggagcagtgttggtgccctggtcagtgctggtggcggtgttagcagagtttaggagaagaacagggtcaataagctccataaagcgcctctgctcagagggatcgaggtcgtaccaagagccttggtgattaggcattgtggcagatgagttcagtacgtaattgagagatgtactgaaagtgatctggggagaggagagaagaagaggaaaggagagtaaggggaacaggggagtaataaatagagcaaaggcggggggatttcttgctctcacttgaattgccaggtagcaggagtgtcaatgggcaggagcgctcaataggcaggagcgacaatgggtgggtggtgtcattcaactgagcctaatacggaaggaggcaggcacaatatggctttggtgaatgaggcacttcaccatcaatagacctattaaggcttgaacttgacgagagttgatattgattgatattgatgcctaggacacattgtgaatagaatacttgaggcagaagagcagggtcctatacaaaatgtcaatatcaaattcagttaactccaaggcttccagtccattttgttgccaactccaggatttctcacttttccaagacgcccacacgattaacattaccattaagtcaaaataccccaaaacaaaagacctcactatctaattagtccagcttaaagcctaataccacctatgaccgtcctccccaagcgacttcttcttcggattcaatgaaacaatccgctgcccaggaagcgtatccgcagtgaaggccgcctcaaagatgctagcaatcccacgtttagcatagtgcgcgaaagaatcataatcatccgtcttcccattaatagccgcccactccagtccactaggcgtagtcccatccccaagatcactccaccgcgtaacaacaatacactgcttgaacctgcgatcatccagatcttcagtcaacttaacctcaatcaaatactcagtcggacactggggacatctccgcatcggccggcagaacccacacagcgtcgtcagcgcgttcggatcaaacgcctgccccgccatgcggtccttgacccggtgctcgagcccttgcaatccgcccgtactccgcggccgcggaatatgctccagcgcacacttacatgccggcatcagctcgccgtcgcgccagtgcgcgcacgcgctaaagtacggacagtagtcctcgcgcgagtgaagcagcatgcgctgcccggacgccgttaaacccggcgccgcgaaggtctggctggtgacgcggagtaagagcctgccggcgtggacgtggaagcgtgtgctgtgcgaccagttgtcgcgctgccagcggcggcccagcgattccggggccaggccgtagctgggaccgaagcggtgggcgcgcatgacgagctgcacgaatgtgaagggcaagttgcggccgtgcgtcatgcggtgacgaggtggggggttcaggacgtttgtggagtttgggcagtcgaagagcgggtttaggatgtgggttgggcggatgcgttcggttccttctttcgtgcgtctgtggtactttacacacgggatgcaaaggaggtggtgtgggacggagatgtccattccgacgaggaaattgatcttctcgatttggttgtctgggtgcgctagagccttgaggtatccggagcctagtcttcggtataatgtgatgctggccattgctaggcttgcggcttcggcgggattcaggtatcccgctatatgtgcccatagctttggtggcagacttgctatatcgccctcgcctggcggtcgacggtcattgtgctcgtatgttggagggtgaatctcgttgacgtcagatgttcctagcgtatggatgatttctgtgtagtcccgtcgctcacccagttggctgtccacttgcgcatgcaattccttgtatttaagtctatggagagccaatggagctaactctggcattggaggggcttcctcgacactggtctccacggccagccgtaggtctgtggaggatgatctgctgcccttgcggagggtttggcgggatttcttgggacgcaatgcgttggagaaaaacgacttgaagccattcttctggccagggctttctgccgacatcattgaggtgctaatagatgtaagtcttcgaggcctagatggagaatattagggtctgatgtttcggatgtctgcggtgatcttttccgcattacgcgatccgcccggtcccggtttaccgcattagttgacatcaggagaacaagaaatagtcaaacaagattcttatattatcaaatattgtatattgaaaacacatgctacaatacatatcaagcgcaagacatcatagcagcatttacaaatcaaatacagttatttaagcgaaacgcttctcgacctccttccagttgatgacgtcccagatggcggagaagtactcggccttgcggttctggtattggaggctagaaataattagtacggatattagatcattaaagaaggacctcttactagtaagcgtgctcccaagcgtcaataccgaggagaggctcccactggccgacgacggggtcctggttctgttaaggggttagtaactagaacaattcaagcgagaatcataacttacggcataggtgcggatggcgatacgtccggtcagcttgtcccgcacgagccaagcccagccactgccctggacgccagccagagcagcgttcatcttggactggaactcgccgaggccaccgtaggtggagtcaatggccttggccagagcaccagaggggggctcaccaccgccggcactcttgggggcaaggttcttccagaagagagagtggttgaggtggccaccaccgtggaagttgacggcgggcttgagagcgatctgagcattgatgtcacccttagccagggcggcctccagctgctcaacggcggtgttgtagccgttcacataggtcttgtggtggttattgtggtggagctccatgatcttgccggaaatggagggctcaagcgcgccatagtcgtcttgttttagtgttagttttagaaatttactctaagtatgtagatacagcttcttgaagctctaggtgatactgaagcaaccaacttacagggaagatcgggaagagtggccttgccacgggtaaaggtcaagcccgcagctccggccttgaaggtagccgaagctcccgagcgaagggcaacacgggccgagttgttaagaagagcagccattgtgaatgtatgtgaagattattatgtggtgaagataatgaggagggtgtcaattgtgaatggtgaatgaattcaaaagaaaagggttcgcggcggagctatgaagtacttaaccgactataacgtcatcttgttttcgtcggctcggagctatgttgttccgagccggatccccacgtgaatttcatgagctctggactgtgactgattgttcgtctaggacactacttgcttgatcttgcactttttgctgaaaaagaggggacagttgatttggccacaaactgccaatgaacccctaaaaagatggagtcgccttcgtcttctgggcagaagcgcaaggtcgctgacatgagctccgatgaagaaaccacgcgcccgaccgttggctttcgggggttcgccagagctgcctcgcgctctgtgacacctcctacaatgggtggactgggtagtggaccccgcaataaccgaaacaccatggccaaccctcgaggtggaggatcgtcacgaggtgggaaaggcatgggaggtggcggtggaggaggacccaacagcttcgccgcgcgcatgatggcaaagatgggatacagggaagggcaaggtctcggaactactggacagggtatcgtcaacccgattgaggtacaggcgcgaccccagggtgcaggcttgggcgcagtgagcgagaagtcgaaaaagactcgcgaagaagagcgccgagcagctgcacagaagggtgagattcttgaagacagctccgaggacgaacgacagcgacgaaaaaagaagaaggaggagcgcaaggcccagagtcggagcggcacaggtacaccgatccagcgtgcgaagcccaaattccgcacagcgcgcgaaatcgaagatgatatggaaggactggaagttccaaatgttctcaaatcactcgtcgatgccaccggaaaggagcagcgtgttctcacttcgactgctggcctgatgtccacgcaacaattcgtcagtcaagaggaaggagaagcgttaaagatcgccaagcgagctcgaaatgacctggaagcatttgcggatgaatggaaggggctgaaagagaggaaacaattcattgaactcgaagaagcccaggtcgtggacgaattggatgcatatcaatcccggatcgaccatctcacaggcctaatcgccgcagtggaagagctggacctctttgaacacgacgaaagtatcacggccaaatttgatgagatgacggataagcttgaggatttggaatccaaatatcgagatgctgttgatgagcagcgacttccagagaccgcagtcgccgctctacatccgttattccgccaggctatggaggaatgggagcctcttgaaaatcccacattcctcgtgtccaacctcactcgtcttcagcctcttctgtctcgcaccaacaagttagaagagccccggaaacgggcatccacttcaccttacgaaacgatgatttataccctctggctcccacgagtgcgctcggcacttctgaatgattgggacgtttacgacccgtccaaggcgaccgcgctggtcgtggcctggaaggcaattgtaccgccatttgtgtattcaaacgttctcgaccaattgatcattcccaaggtgggcctggccctcaaaaattggaaacctcgagctagccgacgacacgccggctccgaacaagatggaaagttcccctggtggcttttcacttggcttcaatacctggatgaacgacacaccaacccgaaacagcccactggtctcatgtctgacgcgaagaggaagttccgctcggtactcgacacatggagtctgcgcaagggtctggtcgatcgcgttgagatctggcgggatgccctaggatccgaattcgatgtatgcttacgcaaccacctgctgccacgtcttgcgcgtcatcttcgcgaggacttcaccgtgaatccgcaaaatcaagatctcacagcgctcaaggatgtcttgtgctggaagccattctttcagcctaatgtcatgggactattgctggtctctgatttcttcccgaagtggcacgagattctctacatctggctcaccaacaaccccaactacgaggaggtcggagcttggttctcttggtggcgcactcagatcccggaggagatcaacgagctcaccatcgtcgatgatgagtggaataagggcttgcaaactatggatcttgccttgcagctgggcgaccgtgccactgctgaactcccacgcccaaccacggcacagacgcttcctacccgggaagataaggtggcagcagctgcagcaactgccgcagcggctgctcctgaaccccgggttaaggcaccggtcgtggaagaagttgcattcaaggatatcctggagggctggtgtttggaggagggacttatcatgctacccctgcgtgaggctcatccgcaaaacggccagccgctgttccgtattacggctagtgctacgggcaagggtggagtcgtggcttttgtccaaggagatgtggtgtgggtgcagaataagaaggcgaaggagatctgggagccaatgggattggagaaccagctagtagagcgtgcggaggggcgatgaataccggcaccatactgtgcattaggtggattgacattgtaattgaaccaaatgtatctattcaagacatacaactttagccctaagtggggatgccatggtacattgcagagggtatgtaattcagtgttgtaaatacttattccaccagtattcaagtaggactgatctcgatgtcttccattatgtcatatgtgtgagtaggaagaaacaactatgttacatcgtgctattctaggattgaagatgtaacaatgctgtaatttactgtgcttcaacaatccacctaaaatttagacaggtcgctagtttctactagtgcaacctaccttgcacaaactgccaagcaattcagaaaaaaactgtgcaatgatgcttagctgacacgtagttgtcccgttgtggaagaaatagaagtccatagaaggccgtccactgttctgaaaagcgtaattccgctcggatttaaaagtctcggggtattcgggatctcggctaattggccaagatgacaaactccatggaatctcatccgaatcctcggagctaagtgtgcaagaggacctccccgcttaacggatatggagtactccttcctcctcattggtgcttgcagtccaggtgaatattaagacgggaaagccgcaatggttccacggtctagaataacatggtccgccaatgatactcctccaaatagactagtggagctatagatctccaacggaaatgcgggatcgccggttgcagccaatcacctcagggccaaaggtaatcaccgcatccttcaccaatggaatcggcgggatttgaacttgcctcgccgcctaagaggacaaaactgatgtcgtgcagatcccataccttcgtttggctgtcagcgctgacatttgaatgtcctgtgattggccctagacccctccttggcgaataaacctccattattttctgcttggcttgcattaactgtgggcttttgcttatttttttttttccatggcgcttgggttgagaccagtgagcgtccgtggcactgggatgttaaaaggggtgaggcgtggccgatcgttggagtggatttctttcttctcttcttcatactttgtcctatagtcattgttgatatccgtcaaagactaagacatcaattccggatccttctgctggaccaaataaagtgcaatcatttcccaactttgcctttctctctccatctctctcgccagcttgtaattgcgtggtggacttcctacaccgtaccttggagatatctagaagcatatcagtttcccggatcagcatcatggccttgctcttcatcaagcgaaagctattccccacaaaggatgcggacagaatacagtcaggttagtaaggaaagagcatacacccaaagagacatatacttacaggaattcaattcaggcaagcgcctcctcgcccgcattgagtccgacgataccatccgcgcagactctgagcaagacctcgagtcccaaaacggccgctcttacgacaccttcggacggtgcaacagcccagacgaatcagcaataacaaccaacagcaactgcagcacccgcgagcgcatcaacccacgtatcatctcagatgccatcctcggcctctctgacggtctgaccgtacccttcgccctgagcgcaggtctatccgcactcggaaacaccaaagtggttgtgcttggtggacttgccgagctggcagccggagccatctccatgggacttggtggatacgtcggcgcaaagagtgaagcgtaagtcatccacatctggcaaccaatcagcatatgtactaacaaatactagtgaatcatatcaaacaatcgtccgtgaaacacaagagttgatccaaacggactcggaagagacccgcgccatggtgcgcgagaccttctctccgtacgggctctcggactcggcagttgcggatatcacgcgcgacttgcatgcgtctcaagaccgcctgcttgaattcctgcttgctttccatcaccgagagatcgctcctgactgtaaccaggcgtggacttcggccatcacgctcgcgctgggttattttattggtgggttcattccgcttatcccgtacttcattgtctcgcagatcacgattgcactgtactggagtattggtgttatggcgattaccttgcttgtgtttggatatgtcaagacctgtgttgtgcgtggctggtctggccgcgctaatgtgtgggctgcgatctggggcggaatgcagatgtgttgcgtcggaggtgtcgctgctggtgctgcgatcggactggtccatctcattgatatgggtagcacttgatgacttggtggtgatggtactaatgatgttcacgttgcaattaagcgttcatgcattgcagcagtggggtttttgctttctctctactcctaatgtttctcattttttttagctcggcagcgggcgtttcggggacaaagctgcaaaaagctttatgatacacgtttaacgaaaaaataattcatttcccattgacaatctcaagttacatttcaactaccaaggcattactggccaccttagatagttatatagatatataaaacacaaaaccctataaacccaatcccaaatcacccactcaacgcaatcccaaccaacttcttccccttatccgacaactgaatcttcaaagcctcctccctcccacgctccgacatcttcccccaagtcttcctcaaaatgtccaccgtcttctcctcatccgcaagctccgtctcaaacttatcaaactgatcatccaaaaagaccaaacaagcaacatcctccagcgtctgcgtatccggatccccctgcttaagatccgccttgcgcaccagcgcgcccactctcgccgcctcctccgccgaatacccactctcaacacagatctgctcgaccagcgcagcctgtcgcctctgcagtcccgcgcgccacgaatggtacccgatctttgtggcggggtagctgtcgcgcggcacttcccagcgacgcaggtgttgggcgcggattgcgaggcgcaggagctctggggcggaggggttgagggttgagaggtagctggtcattttctgtgcgtagtggagttcgtaggggattgggccggtgggtgtttgggtttggcgggggtcgtcggcgtgcgctgcgtcgatgcgctcgagggctgcttcgtatttggtcatttttggggggttgttggggtagatgggataggtggtttgttctgagtggtgtcgttttaggagaggagtttgcgcttgggatcaattggatgtaagagcgcttgaaagctgggtggtttgatatgagggttttagataagaatagacgctagtccgggtgtggcttggtgtgcattgtaaatagatgtttctaattggtcgagtatgtattggatccacatttagttagtcccttgtacatgacgaaggcggtagtaaaagcggtaacccgattagggtcccgaggtcctagagcccctgaagtggtgatctatgaaagcaaactagttaacaatgcaaatagaagagttgggatgactgtgtggagaaaagcagttaaactacatagcaggtcattttgaagggtccacttgtccagactgtgggggatgactaataattcttttgcttgctagttagttagttaactaacttacatcccatcacatccatctggactctgcctgacacaatacataaagaaaacttcgatttatctaatggccatcccatggagaatatcgagccgtgctatccctccgaggagcattatctcaccgctttacattatctccaggaacatgtctacccagatggaccagcgcctctatatttctaccgttgatgctgagccacttcatcgctaccgaaaaggtggctaccacccagtcaccttgggggaatacttgaaagatggaaggtataaggtgttgcataaactagggtggggaggctactcaacggtttgggcagcaagggatcaaaggttgtacaagctggtgtgacccgaaatagttctagctgactgaaaacagggaagagacatatgttgctgtcaaaatttcggttgcagaaactaaatatgacatgcgagagctacaaactatgaaagagttggcatcttatcaccctcacacggtacaactgcttgataacttcgatctaaagggcccgaatggatctcataaatgcctcgtctatgagcttctcgggccgaacgtcccagatacaattgatacacgctttccagatgggagacttcctgggaagcttgccaaagttattgcaaagcaatgtttgatcgggctcgatggtttacaccaacgaacgattggacatggaggtaaatcacttttcttagagatgctttatatggtatggcacttacctagcatagatctgcatacccgcaatttagccttcactatgccttacatagacgatttgtcggaagaaaggtttattaggatgctagggaaaccagatattggctttgtccaaaaacgcgaaaattgtgataggaaatgcctagaacttggcatacccgaatatattgtgaggcctgcctcgcgtcagacgctttggaatccggctcagactgtcaaaatactcgacttcggagagtcgtttttacacactactattcctaagacactacacactcctttatctctccgagcaccagaagttatctttcgggatcgcattgatcatcgtgttgatctgtggagcatgggctgcatggtaggtgaatccacttgtaatccttataaaccaaagactgatatgttggcagctctttgaagtgttcgcaggccagccacctttcgacaccttcttaataactccaacaattctcgttgaccaaatgcgagaaatggcaaccgacagtctacctaaaagatggcaaggggtgtggaatacgatgaatgcagaggagggcatagaaagtagcggacctaacttacaggaatggctggaggatgtgtacttcaatagcccgctgagtcccgatctcacacgggaggacatagtgaggctgggacaaatcgttgggaggttattgcatttcgagccgtctgcaagagcgtcagcgagagacgttcttaatgatccttggttgaatgagtgatcctatgactatttgttataacggggagctgtcctcattcgtactgtacctagaaattttcacttcttcgattatcaagtctgcgtgctgaaaatagtctctcttcttttgcatcgaccacatcaataactacccaagaaatgtatgcttcacatacaatgaccctgacggctaattatcactgtaagaaacatccaatttgaattaacacatctataggatttgatctttcccaaacgctttgaacagcaaagaaagacacctacataacatcaatatccggccgatgattaacctgcgacgaactatttcgggaccgagcactgtcgtaattacaacacgcaacagcaacacatattacacaatcacaatcacgacgaggtgctgcccttttgggggaacacaagcagctcttgcgaaacatcagaaggcgtcctctccacctggtaagccttgtccttttcaaagatccgcgccacctcttccaaagacagacctttagtctccgggaagaggaagtagatcgttgccatgaaaatcacaagacagcccagatacaccaggaagtatttccagtggatggccgccaaggccacagggtttatatactggttgaagaagcaagccatcgagtcggtggtgagtgtgatggcaaggcccttggcgcggagctggaagggcaggatttcagctgggtatgcgataaacaagggcatatatgccatgtcgtaagcactgcagaagaggaaaagcatgggtaccaccgcaatgccagcctccagcacatgcatctcttggaaaagacccgacatggtcgtcgcggcggataggtagatgaacatcaacattgtggcgattagccagagttttcgtcgtccgtatcggtctgcggccattgctccgccgactgcgaatgccaggttccacacctgcaagctgatattgatggcggcctggtgagatgcgttgtatataccgactgatgctaggatcggggctaggtaataagaaaccacgcctagaaaaagttggttagaaatcggattagaataaaagggacattttaggttcataccatttccagaccattcttgcatgaatcccagaatcacgcaaatggatagacgatgcatgttgctccgggatgcaaagaagctgctccagcggcggcagctcttgtcagactccgcattgatgctcttgcaaatctggtagaattcgtcctgaacaagttcgtcgttctcatcaccattagcgtgatatcttgctagtatagccattccctcatctttcctgccccgggagaccagccatctcgggctctcgggaacaaagcaaagcccaaccaattgaaggaccggatagaagatctgcgtcaagcaggggagtttccatgaccaactccctacgatggtgagtccagcaaaaccaataccagccgacgtgatcgacccgatgaaccaaagtgcattgtataaacccgtgaaggtctgtcgttgacgtgggtgtgttgattcggtaatgagcaatggcgcggcagtttgtgagactccgactccgattccagcgagaacacgagcgaagaagaagacccacggattatttgtggcgacttggataatcgaggcgatgatcactaaagtggaaccgatcagaacgcagatcctccgccccagattgtcggcgatgtaagatccggggatgaacgagcaaaaagatccgagtgagacagctgcgataataagacctcgagcatttgtgtccaggtctttcaaaaaattcgagactgttgttttctttgattagctttgttcctatatagcatgatgtataagatgcctacattcgggaagcaccaggaggccattgatcatgctagcacagtatccagctgtagccgatgcagatagcataaacccaatccctaggtttagttttcgcagccctggatccttcatccagctgctgttggtgttgttgtgtaagaccttggaggccatgtttggcgatatcctgcaaagacagtgaatgtcgtggatgaatgtttcagatcttgaactccgagctgtcaagctcttttatttaaacattgaaaattaattggtaaaagaaaactccgagtgacaatgcgccccaacattcctaggatttatccagggcccgaaatctccgcgcgaggttacagctgtagctaaggagttggaatgaagggagggaagtcaaatgatctgatcaccggacgatttccctgagtttgctctgatccaagagcttggatgtgacacgcctgtcaacatgcctgcttaaggtccgcgattggaatatgagctttcaaggtcttggagagctcggatgtttcaggaatgtttgtagctctcatagctccctcccctcacttttacccacggggatcacttccccggttgcctaagtttagcttgggattcgtagctatagtctccgtatggattcccttgattattggattcgtgatagatcgactcgcccttactcaacgatttgtctctggggaaacggggtaaggaagtttttctctgcagaccttctaggacaagcacgggctatgattttctttcttaggttcgtgagtcaactcggtgtaactatctgctctgcctgtgcgtcacttgatatttgaaaaggtctgaccacggagagtctcgaatctgaaagccatggcagcgtggaatgatattacttcgttctgacgcggacagccttatggcgccaatcggaaaacctcatcaggcaacccggtggcttatggtttccccctgcttagagttgaagcagattcaagaaaataaactttactgtttatgatatgacggttgagtatactactactagtagtaaatgatatcacgaagcatgagttacattgtagattagactgtagaattgatagaatcaagcaacacccgaggttcgtttgaaacgctccggatgttactcctgagcggatgccgatttccatggtcacacagcaggattgaactacccaagtaatttcgactcacgggctagagctcaagagcgttatctaggggggtattcataatattcataagagtgccgaactaaaatccaaggtagtcgattactaaggttagttagggctcggtttgagcttatttggttccaaggtttgtgtcttggtactataaaagcttggaagcttggaagcttggagaaatgatccctgaggttatatacttcatatattacgcaagtatctgtttatgagaagttatctggttattctgcatctcctggagcataaaattgtggatatatatccgaagaaatatacatatcaatgagacgtgcccaacgatatgaaagtcagaatacaacgatcccgtatccacaaagatccaagggcactataggccttacaggagtaattattcgtgatttctgtttctagaacccacatgaatctgtgttgttggcaaattgttgcttataaaccaccgggatgagctgtcaagtcttcacgggattggaagctctagcttcggagagaccccgagacccccaggatccccactaattgaataggggtgatatgctctgactcgtcaatctcattcagccaagagaaactccgcaggcactgccacgatgccaaggcgcagaagttgtttgagacaccggaggccttggcgtgagcttacccttaaaccttagatggcggaagattttttgtcttatctgatcttcatctcgagccctaccttccataccatcagagtcctacatcaacctactcttggcctccccaaaccgaaaaaatgacactcctccacgaccctctaaacctcaaccaatacaaaacaactatatccgagccaaaaaagaactgggtcccaatctctttcagcgacgaaaaggaaaagctcacgggcttctacaaagagcaaaatgaaatgatcgagggcttcctcacagccggcgaggaagagcgcctaaaagccgaagacgaagcccagaacggcggcaaagtaaagctagccgtgcgcgccagcttcacagtcaacttcttcctcttcgtcatccagctctacgcagccgtcacaacaggctctctcgccctcttcgccaccgccgcagatgccttcatggacctcgtttcgtcggttgtgatgctagtcacgtcgcgcatgtcctcgcgcccaaagccatacaagtaccccgttggccggcgtcgcgtcgaaacaatgggcgtcatcatgttctgtgcgttgatgaccatcgtggcggtggagctgatcatcgaatcggccaaggcgcttgcggccggcaagactgagtccgagcagctggatctcgtgccgctggtctgcgtgggcgtcgctatcttctccaagttctgtatgttcttgtactgctatggcttgcgtcggtatcccgctgctcatgtcttttacattgaccaccgtaatgatctggctgtcaatgggtttgggttgatcatgtcgattgtgggtgatcggttcgtctggtatcttgatcccattggtgcttgctgcattgcgctgcttatcttgttttcgtgggcgtcgactgcgtttgataatatgtggttgattgtgggcaagtgtgccccgcgtgaattcctgaataagtgtgtctatgtgacattgacgcacgatcagaggattcagaaggtggatacggtgagttgagaaggtgggtgtattattgacgtttgactaacggtgcatagtgtcgcgcttatcactccgggcagcaactctatgttgaggttgatatcgtcatggaccctgagactaagcttcgggagtcccacgatgtaagccaagcgttgcagcggaagttggaaggtctcgcggacgtcgagcgagcctttgtgcatgtcgattatgattatgagcatgatgtcaacgaggaacacagaccactctatgagattggtggatcgaagcactccatccgagctttggtgaaacgattgtggtctagaaacgaggacaaggcagacgggactgctgtgtgagaagcttcgggaatattgattgagctgggctccaatgtctcggaatgttatacgcagagtatgaatgcagtaaacaaaattaatatcttaatcggttttatgaacgccgaaatagtttctcacagggcaatttgtcagacataaaagcagaacatgacattaacactaccggacgttcaaaaaatgatatcatctcatataaacactaaagggcaggggctctcttcttagtcttcgcaaagatgccataaggcttgacactaaaagcgccattgaaattcttcccttccatatcaaatgtatactccttatccgccaactcaaaatccacatctttgatcatgcgaacgagcgcatgcaacgaccattcccaagcataccgcttaccgtaacactcccgcttcccgttcccgaaccccttcttcacaccgattgggagctggtcaaaggcctcaccgagcatgcgctcaggcttgaaagcattgggatcatcaaagacagcagggtcacggttgacagcagacagaatagcaatcagaggctgagtcttgggaatttcgtattcacctccgagtatgaccggaccatgagtgggcaacggctcgaggttgaaacccggggctgtggcacagagacggaacgattcgcggaggatggcctcgcagtagggcaattgcgagagatggaagtgttcgatttgaccggagggaccgaggagggtgtcaatctcctgacgggcacgagtaaccacatctgggttcttggcaagatagtacagagtgaaggagaggagattcggggatgtggcgctgccgatgaaaatgttgattatctcgtcgatgacccggctgtctggaagggattcgcctgtcttcgggtccttttcgtggagtagagcatgcagcaaatccctctggtctatagacttattgcgtcgcttggcgattatctgcgcgcaatagtcgcgacaaatcttgatatccttgtcgaatgtactctggtacatgagtcgagtgaggagcttgggccgcgtgggccgacgcacggcttcaaaggtcgtgtctgacattgctttgatgacggcgggttctgcaccaaggacacagtctacatactgaccgaagaagcatttcatattggcagcgtggtttagtcggtccaaatcattagagacatccacgcgctgcccggtgctctctgttgaagtccatttccagatcaagtcgtccgtcgtgagttgtatatccctatgcatttccttgacggcctcgggtgatacgaatggagccatgatacgatgcgcgatgccccagctttcctcgttgtcaaacgcagtaaagagactgtcatggacaagactgcggatttcgacaatgggaccggtgacgcattttcggaagcgcttctcgtcgcaaatttcctcgagaagagcggcgtttgtaatgaagacaagttgcttggtgaggattttgattttgaagataccagctccaccatgttctgctgccagcttatttaaagacgcccaggtattgccagggatcatatcgaagatatttcccagaattggaagcccctgaggctggggaataggcgacggcatggtgtgtatagactagagagggagttgggaatcttcaaaatatggcaacccacttgtacttatcagtaggacgaaaggactcgtcacaattgaaaagtatgcaggtaggagctcgcagctcttgtgccacatgactgaaatgacaagcctctgagtggtccacaattagctttggtgacattgcgatgagcctgaagatttccgtattctcgtccaattagagatcgtattgtcacaaacatcggagaggtgcagctaagctgcagatgaactccataccccgcgtgcccacatgatatgtgatgtgtattgcaagtgggaagatcaggggaagagcgtattgaaatagagaagagtaaggggtagagttggtgaatgctgccctgagaaggcatttgaagccgctgacaaaccaagtagacaagctatttggcatatcaagtacaagccaattacgactacatattccaaatgcagcttctactgtccaatgaagcgtcttgtcatctattgaatcgattgactaattcttcctcgcctcgtcatcgcggaatgatatctccacgctgccaaggccgaggatccaaaaattcatggatgtaaaaaaaaaatgtaaggaagtgtcatgcacactccctgtaatcattgatgaacacagcagaccatcgagggtggccggtagaagaatcatggaaacaagctgcaagcataagaaaccgtcaagaaaatcagaataaccaaccattacagcagcagatctcgaatagctgtgcgcgagatataagaagaacagaaagaaaaaaaaacaagggcagggaataaacaaagcttacgaaataaaagcaattgatcatatccactttggataactttgtctcccgcccaaaacgccgtccgattgatgaagccgggtatatccagcaccgtgatgcaacatgtactgagaatgaaaaaaaagagatcaagaggagggaacgaggcattaagtacacgcgccttgccacagtagcaagactcgagccgagccgtcaaccccatcacccctaggttaatatgggcagaattggtgtttcatcgaaaaaaaataaacagaaacagcttttggttgattcgaaatgatcatagaacccatttcgtcatctggccccaatgccgaacatgcctaccccgtagctagcgcttctttcggacataggggttgacaccttagcgacgtgaccctgattagattaatttttatcaacagaattagttgccatggggatgctttaccttcttgcgtttcttcttcccagttccctcgccgttcgagtagaatccggggtcatcatcatcgtccacaaacccttcgccatagccggcaaagctattgtcatcataatgtcttttgcgacccctgctaggccgtggccgatctgcttcctgtggttgcggagatgggacataggattgggaagagaagcgaccagcaggagcgggaggagccttcttgccaagctcgcctggcgctggattcttagccgccttttcatgacccaagatatcttcccagaaatcgttgttaggaatcggtccgggttccatttgcatggctcgcgattggagattttgtagcgccgaatccatgtctgagaccttgatagctttgccatgcaccttttggttctgccattcctcttcaggccatagagtcatgtacctcagactgccaggggtaccgatctccttcttgacgggtttgtttcgcccagagagtcccagtcctttcagctttccttcgtatgatttcctcaagcggttgatcttctcccctgtcaccggatccatgcgtgctaccgagtgtgcgatcgggcctaacccatagagagagacgagatccactgtagggtcgggaccagtaacgatcggagctgtcaatgaggaaaaagcagtgttaacaacttcagtcccaagaatgtgcaagatcagtacattcatggagctgcacacagtagatggcatgatgcgttttggggaatcttacatctcttgcaaagatgaaaagccgaggttagctctttctgaagagaatcgagatcgagactgagggtgtctgcccgagtcgaccctttattcatatccatagcgtcggagtctgtcgaatgttgaccttgcccggtggcaaagtcagtgctgtctgtttgaaaagattgccgatcgtggtcggtcggtctgtgctgtgttgattgctgagcgggacttgctcccgagttttctgccgagtcctgcatccccatattgaaagattttctcccctgatccacatcgtccgaattcgcagtagggtgtccactgacactgctggcgggagtggggaatgcattggtggtgctcattgtgggctgttgggagacttgggtagacattggcgcagaggacggaggggagatgttcggagagtggaccgtcgcctgattcggtgatgatatgaagttggcggcatgacttggttcgctcaccgacatcaacggaggtgatatcggggtctggggaatgtggtccgaagaaatagggaaccggatgttctctttcagagacccggcgggcgaggagggtgaaggaggtcttgcttgaaaggaggtagggtgagtgcgatcagacatgagagcccgaggaagagttcagcatgcagagacggtattaaccagagcggctctgggtccgaatcgcaagtttgataccagggcctggagagggggattcccgatcacggtcgacggtcgctcaggcaggcgggcaggtcattcaacgggcggactagatcgtcttcattccaggggactagagtgaatccctgcgagtggtaaagattgggtgcgtgatgagtggcggtggtgaaggagagtgatgatgggagataatcctgtggtcaaagccggcgaggatgacggcgaattgattaattcacgtgaccgggcttggcccgatgtactttattcccattgtactctattgatctatgtacaatgcaggtattcattcatgtatttgtctattcattgctattctctgagttgggtctttattctcaatacaatgcgaccatatcagtccatcaattaactgcaaacaaccctccccttagcgagtggcgagatcaagtaagattaaactttgtatggcccctacatttgccgggaataatcccccgacacttgatcaatgacattacgcgttgcattcatatctgtaggatatgctaatcagattatgccacacctggacactctgcagatgttggtggcgtatcccgggtcttacatgcgtccatttttatcccaaccctccaagtcatgaatagaacagatatcaaatggaacttgaaacaattggaaatggtatctcttactatttaaagactattcgacaaaaacaaagtcaggtggtccaggatgcctttcttggcatgggtgacctacagcccggttggtaatatgaccattcaagaagacatactcgtggatgtcagaagacgaaccagtctaagacagaacatcaagtgatatatcgggaatcaaagcacaacccccaccaagcgccagagctcatcaatataaaatgatgcccgagagagatctgacctcaggactgatagtaagcattatactcattaaccagttgggcagacacgtcgggtatattgtgttcgagggaagccaaaagctcgatttgctcttgttggctgagagtgcgctcacgccatgaaggtactggaaatggctcgtggaagtactgagagtactggtctgcaatggagctggaccagttcatgggattgacggtcgcatcggtgtatgccaaatgacctgcggttgtggaagcaagtgagaagttggggtcccagccttgaaggccgggaacaactgaaggtattgtgttataaggggtgttcgggtcaattgataaatcggggtagagcgtcggcccagagtaagctgctggtgtataatgtggtaccacacttggggctgtgattggtcgctgcatgtcaaatgtacaggaaaccgatggcacttgtggttctttagacggtctagggcccactgcaggtggggttgattcttgcgcaaatgtaggatcagccgactgtgccctagaacaggtaccgtttgaggcggtatcgattgatagattgccacggtggttgttggaataatacgaagcagtcgtgctacttgacgggctggacatggctggaggggtcagtccctgtgaggaggttggcgtaggatggttagaaggcgagtgtacaacgaacgattcttccgtcctgtacgctttcaggcacgcagcaacaaggcgcctgtaaagaaggaaggcagattggacacctggccaacgttcggcggaaaatacaattacttccatagccatatccaaatggccttggacttcctcaatggtgtgctcttttcgaatttcggggtatgagagggtccagagcacagtattcaaagccatgaacagggcttgcacaaacacccatgtcaggtcgacagatccagtgatcatctgttctttatgcatggcgatattggagatggccgcgtcataacaggttttggcagcattgacggttggttcgggtatttgtggtgagggacgatacatgagaacaatgatggtattccgtctcccttgaaacctgtagaagttattgtcagcaaagctgcattgggggaaatgggtatatcaacgaaccatttcacgttgagtccactgccatcatcgttcttaggagtagtggccatccaatggtcaattttggccaacatttgagaaaaccatggatcctgatcatcaactgggctctctcgtctgtttgagtagagcattctcctgggctccaattggagcagtcgcattttgaaaaagtgaactgcaatacactttgctagaacgggtttcgctcccggggtgatcccctcggcggtgatgtaccggtcatccaccagttcaaagaatttcacattgatatggtcgtggctgacgcagtagctactgcatcgacccagactatgagaaagaccgaactccattgatgagacgatccaaaataaccttcgacgcatgtcaatctccaatggatttaatggtttcccacacggtgatttggtgacggtggcttcttccgtcaatcccaagtcctgacaaagtttggcagccgtccccacgacccagtaggcagctgtgcgagtgggcgttaccattgaatatgaggcaatgagcacgaggcattgcagagcccctaaatccaatcgttttagtgtgggttccaggtagggcaaggccgcaaggtaataactatcagcgagaccagcatattctgtgctcattttctgcatgctgatggcgatgaccatccgcagttggaagtttttgcagggatctgtagagccattgaatacctcctctacctcttgtcgaaatgtgggctcgtgcaggagcggaagtagtgcttgtgctatacaacgaatcagtcacacgagctacaagaaaaagaatcagagcaaagtgatcgcagtacctttggccacaaaaagatcaatcaacttataggtcagggtctttggaggtagattgggttgtgggatcgagcttatcatgggatagacttttgatgtcggtttcgagtcttcttgggtgaaggcatctttgatctcttgtgcggtgaattcgggaacaacatccttgatgcttttggagtcggtgttctgcttggccatctccatgaccaatcgggtcatggcgatgccactcgaggcgccgagatatcgcggctcatcgttctccttgaaccggatgcgcccggccccccgcaccatcaactcggcatcggcagcatgttgtacctcgttctcggctttggcaagctctctttctaatgcgcgggctttctctctgagcgataggatgtatgttcgaggtatagttgtgtcgcgggtcgagtcgtagtacacgcacttggcattgcttcgttcgcagggcgcacatcgtggaattccggggtcgcatctagattttcgctgcacgatggattagttgggaaaagcaccaaaaaaaagggcataacactaagggaggagcaaaaggttcaaggtgacggggatgggggagaggggatgtctcctacatgtctacaccttgtgcaggcggtcaatgtgtgagcgatgcgaccgtccggtggctctaatgagtgtaattccggcgactttagccctgtggaggaggagtccggacttggggtcatggtgggccaaaaagggtataagattaaggaagtcgggaaggtccaatcacattatacacgatttatacccaagggacctttcgaagaagcaaattgcgaacagtcgacatgatcttgaggctcccgaggccttgacaagggggagattcgagtttgaagatgtgaaacggagaagaagttgtgtccggaatgggaacgaggccactaatatgcttttccaagggaggggggccctcggtccagatctggagagaaggttgggcgtgggacaaggtgaggtggatatggtggaggcacagagcagctgaaaagagagacctggactagtttagggaatagatggtgtgatgtgggtgtttaatggggggttgctagtatttttccgatagttgatggtattcaacagtggtttatagtggtttaatcgacgtaaccaacatcttcatagacacttcatagccccaagagcaccttagtaataaagacggggagattctcgccgtccgtgcggttccacagatcttccctcccctccctctcctgtcctataacagccggtctcgtttaaacacatcggatttcggtggagttggcttttctcttcaacgtcttcggctaaggcttatttctcgagcattagtcgctaatcctttccctccagggccagctcatgcaggttcaccccttcggccctctatttaatgtcacgtgagtcttttgtgccgttatgtggagatgtgcagggggggagagtgggggtcccatatcctcgaatttactgaccgtgaccagtataatgagcagacatgtccgtcaccgctacgaccttcttggataatcccttgctcaaggtgagtcggccagtcgccgcctgctcgagatgtcgcaccgcgaagatcaaatgtgatggcaagctccccgcatgttcggcttgcgaaagagtcggcaaggcgatcagttgctccggagcaagcgatgaattcgccaaggggaaagagagaagttatgtcgcatcactggaagggtattgtgagaaactcgagaagaagatcagtcagatgcgtgcccgatcaacctcgctgtctgcggagggtgatgggatccctcgggagatgtcaatcacctccgtctcgtcagagagggcattgggccctgcccaccgcagagaggtttcggacattgacgatttagttggcgattttggtttcttgttagtatggctggattgctttcttgaccccgctgacacttcaaaagatctgtcaatgcgacttcgcgagacttccacggcatcacctcgagtacctccttcgccaaccttctcctctccgtcgctctagtcgattcctccccaccctcctctccgtattcactacctgcgcggcacgaagcaaccccgttgctacaatactatttcgataatatctttgtccagctccctttctttatcgaaacgagcttctggacctcggtggatgccgtatatcagtcaggcggccggttcgccaaaccgttcgatcattggatgctgcgcatggttctcgctatcgcttcggcgtcactctcataccatcacaatgataagagccaccaaagggcatgggctctcgtgtcggaggctttaacatatgccgaggaagtcctccgccctgggtcaatctcgggaatccaagcaatcctactgcttgctcaatattcttttgttgacccagtacgcttccggagttggtacttgattggaatggctgtcaaggttgcgatagatctgggcttgcatcaagatcccccggctgaggttttgactaatcccgaccgacttgatattcgccggcgtgtgtttcattccatctattgtctagacaggttcgtttgtttctgttcctcaattgctgccttgctaatcttctatcacagaggattgagtcctgctatgcagagaacctactcgttctccgacggatctgtaaatgttgcattgccatcaattaccgcaccaggggccctcctagagcagactcacattttcctgcgcagtccgggacctgccttgcatatcgttaaaatccgacagattctgtccgcgggctaccaagaaatgcactacagcgggcgcgatccatccccgcagcctcttgtcctcatctggactctgtgctggcgagcccgcgaatggttccagcaatgccccaaaaatgctccaaaccacttttcacttctgtaccgactagaattattatacaccattatcatcttgatatccccttcacatcgatacccaattctccacgactacagcaaggctctcttattcgaccggtgcatggactacatcagccaaattcaccaggttctagaaaaccccagcgccctgcccttcctgacatacttggacatccagcgcgtgcaccaagtgggtcgaatatttgtcaatgtcctgtccgacaattacgacatgctcattagcgccgctgtcccagcacccccgcccgtccccgctggcactccagagccgccagtactgggcgacgaggacttgttcaattgccacgcacgtgccatccgctgcctgtcctatatccgcgacatgctcaaatattgcgacaggaagtgggacatacatggccatctagagcagttcgaggacgagtctgcgtccatagagaaaactctgatggatggctcggtgggctacatgtcgagccaagagatatattgtcaagacttgttgtcgggaatgccgctggccggcgatgcatattcggggtaccatatcgggttatgaaagcattttctgtgtgatatttgggcatatgaattcggaaaggaaatgagcgtggtttgtttttggttttgtgaaatacccctccacatgatgtgtataatgaataatatagtgtgaatcggtccaataaatgggttcactacacactggtactttactggaacttacttcgagctgtagtacggtgtattgatgtacaacacctacctgccttacttgcaaggaacgatgctgtgttaatgggcaataactccatgacatcattttgaacttaatcttgcattttaggaatactatttagaatatatatcatgcattgccaattgtaagttaaccattccatcacccacattcaagcctgaaacgattgggctttatagattgctcatcatcataaacatgcacagcgtcatatcccatgttccagtcaactcatagcctacttgagtttataatataccgaggctttagatttggcacgtgaaatcaaaaaccacttgatgctgatcccgatgcggcagaatatactgtagttacttgtccccggtgacatattcttattctaggacaacatatttaggtctacagcgccatgttcttcatgaaaacagcaatgatcacaagtgaacaaagcaaggggaagcggcttgtccgagctatgaatcctctaaccattcccgaggtatgttgtggatggttcaactgcaggaactactgaaccgatccaatcatttacttgtggactttacttgtggacctgggcttgggcagaccggtagttttctagacgtttccacatgatccaaaccagccctaagattcatggagtattgagtttatactatagcacaataaacacaaatgaatgtatagcagtcactgaatatgccttgctagttgattgctgttaaacccgcgaaggccgattgagtctgcgcctagcgagtcatacaatgcattagtccggctcgatccgaggaattactccattcaaagcgagtggataggccaaaatgtcctttgttgagggtggatatacgacgtgttgtatgtactccgcacatacggacctcgggagtagtagtggaaacattgaagtgccttataaaccaaatcgaggccaggccggcgaatttcggacagaatgggaatacctaaggaaacaagcatcttgtgccctagcattcgaagacagcaatggtccatggattattgagttgttatatcattttctcccgatttggcagttaccccttatagttgaaggatatccaatattaaaaacggcaatagatcggaaaaaccaatggatcacggcatagcatgggcctatgatgaaaaaaattcaagatagggatagtcttgtcggcttctagaagttcttattctagtccgatatactagtgtcaacgggaattcaacggggaacccaacagggaatctccgaagtcttctccgttcctgctgatcgacagagcctctctcttgggtgatgtacggtggcacccaagcttttgacaacgcgatcttggatcccaagtcccggcagtggctggcggtacattatccagtggagtcaagtttgaccatcgcctttgttccggtcaatcttaacggccttggcggtgaatcgatcctgagtgaccaatggaagcccgtctccgcagccattttatttttatcgaaggaacgtggactggagacgtgtggcgtttgcaacggaaaggggggccgttggctaaaaatggccaataagagtatcttgaatggcagttaggtggagatagttcggtcaggatgccggctgattggcatttagttccacgctattggattcagaccccatatgggccttttcaggcagttgggttcccctatgtggcgctttgcagatcgttctttgtttctcgtggagtgccactctagttcagagcgagaacgacaacaaagacaaaaagtacggagtgcgtatggcaacaataatggggattccttgacacagatgatccgctatttaaagtgggtttagaatatcagggggtttactgccatggaggtactacaggcgctgagttgtatattgtacatttaggggatatcaccggatgatcatttaccgatagaatctaatttatggttaattcacagagtttactccgagactatgggcaagcccgcgagtataagctcacgctagcccaatctacgttgtaagcccaagtatggagtaactaaacctcgaggttccatgcgccctaaacatgggcatgtagatctcaatttgatcctgtaatccggtagcctccaaactgacatgtttgatttcaagaattctacgatttgggattgtcgcgttatttctagggcaagagtgaggacttcaaagcatgtctaaatcttacggataagcttcaactacaagtgccggacgacaacgccccatctcgtcaatgtttgtagacattgtcaatagtggacagaccccgttgttctggttgattcggtccatctcggcataatggagatgctcgtcccacttaatgcttctctaagactccattatagccaactattgagctgacccgccagtctggatactgctgcttctttgacaagtaaactccctaacagggacaggggtagtaagatcgtacctgtagatcactcagttcatagtgtataaatacggtctttctctgtgtccccatcaaagttttcttcttctccaagcttcctaccacagtcattctttcagcaactacagtcactcttttcagtttttatatacctattaatttcacaatgaaggcctctttcatcgctaccgtcgccgccatggccggctctgctttcgccgctcccaccaccgttgttggtgccgatagcctcctcgtcggcctcaagattggcgacatcaccgcggagctcaagctcagcgagatccccgttgtctacaagctcggcgacctggccaatatcctcgaccttcccaccccctcctcctctatcagcaaagtccccgccgtcaagaacggtcacctcgtccaggacctcggagacgaggtcgacaacatcctgaccgttgtcggcgaagacctcacaaccctcctcatcgagctgtcccccgaggtcactgccctcgtcgacggccttggtctcggttccctcggcgctcccctcggctccatcgtcgcctccgcctcaaacattggtggcatcgtctccggccttggctccgtcatcgacggtctcgtcactgttgtcggcgctgacgccggtgctctcctcatcagcctgtcccccgaggttgctggcctcgtttctggtctcggtctccctaccattggtgtccccgtcggtaccgtcattgctaccgtcggccagaacctcaagcgtggcgagattgtccaggaccttgcccctgttgtccagagcaccatcactgtcgtcggccaggacgccgaggatctcctcatcgagctctccccctccgtcacctccctcgttgccagcctcggtctgacctccgtcgccggccccattggctccgtcgtcgctgaggccgctaccgtcggtgagcttgtcaaggacatctccgttcccgttgcggatctcctccacattgtcggccgtgatggcaagaacctcctcatcaagttgactccctccgttgttggccttgttgctggcctcggtcttcccaccattgcctcccctctcggtgccatcctcaccactgtcgctaacaacctgtaaatgcttaccggcatgttatgactctggttgaataagcttgcttgcgtggaggtctgccatcggtatgactttggtactcactatataatcataagaatttattatattcatctatacaatgtccagagtatttgacacataagggcgggtaatactcatagtaattaatttgttcaggcctctaaatccaatttaatttagaagaggggactgcaacggggacagcaggagcaggtgtgagggcaaagttgtcacttggagtagtagggtactagagagcagaacaagaacatcatggggtgactcctaagaagagaaggtggaagcatcaactagttacacattatgtaaaatatcttggcaaggacgtaaaaacctcaaacagacatcttaatggagagagaagacctgttgcattcactggctaagagagagagagagagtaggttcaggcggggaagcaaggtcctatcttcccgaggcaaacggtctcaacaaatcttctccaagcacccggacaagccgaacagttgatgaaaaaaggagttcgcgtcgaccgggggtagtgtaagcccagtgacactgtgcaacgaggcgtatgcaagcacagaggccaagtcgcgaggtccaaatattagaataatcatgacgttctgcaatgcagaacattcagcgattaaactgaatagaacagatactacacatgatctaagccagaggcaaagagagctgaagaagaaagaaaagaagaggaagtcctgggggcagggctaccttcttataggtatcctaagggcggtcggtttatgccactattcataaacaaatgagacaaacaacgacatgggctcgcttaattaaatggtaacgtgatcgtgagagcaggaacggcgtctcttatttccgcttgacttgtttcacaactgtcattcactttggtgtgaggctataatgtttggttcttctgatatcagcaagagaagggctgcaggtatactaatcttcatccccgtggggccccacgttttgtttacagatctacggataatttaagcactctccacctattggttggcacgggatatatgctttgttctttttgaatctatttacaatgaacagtcctagactcagtttgccaagctatgtatttccttcagttataaggccacactttcgcatgaaaatcccgctggctcttattctcagccaacccaatagattcctgcctgaaacgctcattcgcctccatggcactttcgtagtattcgggccgaacaatgcctcccagcggaataagccctgcgtcttggagctgatgaacaatgcccgaaattccctccaagagattcatttcgtctgtatgtctgagtagctcctcttccccgaaatcgactggaagtgactcttgctcgtacttgagctcagcccagcgcgcgacaagtttgatcaagaagttgcgaagagaaaatagatcttcccggtcccagcatcggggtactaaagaaatagggtcttatttcagctcgtgaagtggatcgttgagaagttgccttctgataggatcgtttgtctttgtgacatcatagtaatgctctagaagcattttttcctctttcatttgatcatcagggtatggcgaggctgatattccagcaatcgcggatgagaacactgtaaaattgaatagaaaagccttattaaactgtccctcgacgcatttgagcaactttacacctgtttcaaaagtcagtattgaagcgattgggtaggtagccacttacaagtcgttccggcatctccaccaggtttagcagaggcattcagaagagcctgcaggttaaatctgcgataacgcattcctagtttttcgggttctccactcctgaagaagttagagtaatacgaatctgctcacaagcgtgacatacaaccaccgatatcgttgatattggaataaatcatcttcctcaataggtcctcggtcaatgagaaatcacccgttccatcctccagcgctctccagagagatatcgtccttgcttgtggcatctgggttcttgttctctcaagcaagggaggtgacttgaggatgggaaaaccctgtatgaagtgtggcctcgtatcaacgtattcatctttggatggtgggctgaagactaaggttgaaggggtagtcgtcgtggtgtcggtgagccacacccctgacaatacacattgtaggtatcgttcgtatggcatgttcgtacaaaaggtacaaactgtagtcttgacttttattttttcgggatactagctatgaaacaaaacatttatataatatagcacaactctgtactgtgcttttgcaaaggagcctctatccccatatgttctttgcttgtatcaaattttcatgtttactgccaatactgagcatgcggctgatacattcggcgctagtgcaattctgaaacattcatccatgagattgtctagggaatactacctattatggaaattgcatagaacaagtatcccgaggtttagagcactaattcgctaagatatgttctaaaaatagaaccgtatcagcatagactttgtacctctactccgtacttcgtatatgaagtcggcggcgtactccgtccgtattacctccttaatatgcccgcatgtagcaaatatagtcccaagtaggtatattacaaatcaagtatctcgtcattagctctgaaatacacaaatgagtattattatattgcttatctcggtccaataacctttggtccgtacctaggtagctagctccaagatttgggtccgagcggcctatcagagcgtcgcctgggtccgcactgtagggtttgcccgaataagccccgcttttattctttgggtaggccaatggcggtcgatatatatcgagtaaattaaaggtttatctttgactttctccgccacctcctgccgtttgcctcgtatttctctccgcaggtcggttttttgcatacatccccttcctccacgttgtccccatctccccctggaggcctctttcgcttcttgtacatatatgcccttctcctccctgtttcgaccgtgcgacttatgttttataattgtatcgcaacaccgtcgctgccaacagcgatgtcctcatgtcccttgccgacattgccggcaggaatttcacctcccctgatcgctccggtgaccaattcgcggtgcatactgtagtcgcctgcctcatcggcattgcctggtacaatgccttggaattgatcgttctgtgtttcaccaccttcaagagatatggcgggtgctatttttggtgtctcctccttgcctccttcagtataattccgtttgggatgggatatatcctcatcatcttcaatgtatacgacaacatgtttcccgtggcgatggagctagttgcgtgggttgggatggtaacgggccagtccctagtcctgtggtctcgattgcatcttgtctgccacagccgaaccgtgctccgcgtcactctcgccatgatcattgttgacgcgatcattctccacatccccggggccgtccttgagctcggtagccattcgaacaaatcttctctcttcaccgacgggttcaacatcttcgagcgcatccaattggtcggattctccatacaagaaatcattctctccattatctactcctgggaagctgtgcgactactgaatctccgcccgagaggccattaccgaggtaccctggtccaactcttgatcgtgaacgtagtcatgattatgatggacgccgccgttatcggagtacaatactctggtctcttcgatatccatgtcaccctcaaggccatggtctacagcgtcaagctcaagctggaatatgcgatcttgggcaaattggtgcacatcaccgagggcggcagcggctcgaccccgaccgacctgtcggatttcgtggatctttccttacataatccccgcaccccgcgaccggatagggacacgatcagagagaacccagagaatggctccaacactcgggtgcgagtcccctccaagggctcgtctactgatccgctacgaaggagtctctccgcccatagtccgagttcgagtaacccggactactcttgatgatttcacatgtaataacgacctcttggatgtttctgtacataaaaagttacttagtatataatgacgacatagaccatactctcaccagtcgagtgttaaatctctcacctataataggaaagtaataacggcattgtcagacatcgccacgagcttgatatcaaatcgagcacggtacctcgtattccgtatatcaatccgcaatccccaaacccactgaacccacctatcgacccacccatacccaaatccacacctctgaaccccaactcacctcatcctatgagtccccgaccaccaagcgcaagcacaagacctgcacaagaccaaaccttcgcagaaatcctcagacaacggaacaatccttctctcctcgaactttgtgcgcgtaacggctggggtatctgacgtcggagaaggcgtcgggggaggttattcctgttggggatatagggaatttggccctggctttgccttgtcgaaggtttttgagagggggcagagtatggtagaggttattaggccgcgaattgaggggcagggaaaggtgcgctgtgaatgttcgagtaagctggggcctacatagtggtgaaggtgtcgtaataatgtatgacgtgttggtgatgccggatagtaacgtgatgataatcagaagtactgattattcttctatttcattccacaagtgcccgagttgctctctgtccatttcctctgaccttcattttgtcttagatttgaagatatataacctctcctgtgcctgcgctggtgctacgtccgagtgactcgctcatttgttcttatgctcctcgatagtactcttctagtgaatgtctagcgaatggagatattccattcaaaccagcaacgagccgcctcccgtcctagaaaagttgaatgtttggacatgcttcgttccttataatgcttcctaccgaagtcacctcggaggtccaaagagtaggaaatccatttcctcttcaagcggtaacagagtcttttccttgaaggcgttgcagtactgatcatcatcgaaacttgcatcggggtcgaggtatccttgtaggcaggtcaaaatagcctgggagaaggcagatgacaatctcccatgagaatttttctccttgagccatccctccgctaggtgaagacccgattgatcacccggtaagatattagtgatttgatcatatccgagtctttgctcaaccggacttccggaagtaatttcaagcagcataatcgccaaggcaagcaagttcgaacaggttctgttgataagtgtaggaccaggtcctgttcctggattttggatcagctgcgatgatttcgaaattgagtcctgaagcaacgcacctcgatgaaattctttcactaaggaagggtatcttaagtcgacagacaatggcatgttactgttggctcttgcgaacacgatgtccctcttactccatttagtttcaagccacggagtatggtttagttgaaaaatcgacgctatcaaggtgatggcgagtccgtacacttctgctatgggtagttgggcctcgaattgcggaaggagggcctcgagagatgaagactgctgaacgtattcagcagcggtctttttcaaggaagggcgtgatgccagacagcccttatcattaaggcagaataccacaaatggatgtggggattgcctaatgactttgcataagcttgtgacatgctgcaaatttgcagggtcgtggtcgtcctctggaactgatatcgtcacacgaacagttcctgttctcgtgctactttagcgtcatcactagagctcaaaaggacagcaaaagagaacccaaaagtgcgtacctcgacgggagttcgtcaatccttatttcagaattcaaccactgagaagacgcattgcagtccccacgaagacccaatccaaaacaagtcgcctgcgccaccaagttcaagctcgctgcttgcagaggcctcttcgttttctttggtctcaccagccgttgctcgaggagcagacatgcgacatggacagggttatcgtcacaccagtttcgagatattccttggtgtactttggtcgcattctcttgaatggtacccaatgatgcagaaaatttcaacttcagacgactctgcggtgtttcatcctgcagcttgtcggctctagttgcccaggcatcaatccgttttgtacaagtctccaaacgatctagcgcatccttcacgcgatttttcttcatggtaaacttgatcctccttccgaattcgaaatctttgtgaaggaacgaagtgttcgcgatccgcggattggaaacgacaatcggcaggaggtctttgcttatgaaaccctaccttccaagagagtgctcgaacctgctgcgatccaggaatatcgaggcaggccgctatctcgaccaggatttctgacacttcttctatggtgagaatgagtgggtcgtatactgaccctagcctatcgcgtagaccgtcagcgatgtctccttttctccacaattcgcttcgaggatcctccatcatcgtggtttggtctgcaacgtcggctgccttcagtaagacacggacggcttggtcgtaagatatgtttattgtataaagctccctaattaaccttcgcacatgccgtctccaacgaaaaaaatcttttgtgggagctgccaatttctcgtagttctcgagggcagatataagcagaggaatgactcctaggacgagtccagctacttccactcctgtcaccatcttggattgggaggccgttggcgagataaatcaacatgaaagaaacaaggctcttccctcttcccccgatcgagctatgagttattcccaggagaactaagaagttattcccaagggaaacgtgttaacgtggagtctctcaagttccaacacccgatctcagccgcacgtccttttgtcgtggcatcgaccccaccaacacgcagctcttggcgttagttcaaacgaatggtctttttacattcactcgcatccttccgttattggaaatttgattgtgatcaggcattggagaaaacctcggcgaaccgcgtggatacacctttggttccattaggcccgagtcgactaacaagtttgcaactcatcaactacgaaagataaaggtgattctcacgaggtgtacgaaacaagatttcctgaacctctaagatcgaaaccctagccatggatgacatcggcgttctttctacctcttgtctaagttgcttcgatactctgacacgatcgctgcgcacatcttcggatgagttcaagaaacagatgaggccaatagcaattgaaaatgaatatgcccgcttcaagatttgggctggcaacctgggcgctttacagagaggccggcattctcttgatgctagattacgagactcggtggtgctacgagcagccgtcctcaaattcatgggagagttacaagactctttgagaaagagtacgttgtgccacatctatgacacctcctatcatctctagttggaaccccttattgactgttattgcccaggtgccgagatcaccacaggtcttcgcctaccgtatgaacagggtggcgatgccacacatggtcccgacgaagatgctgaggacaacagtgacactagtggcaccagcagtgacttggagtctgcagaactagctgagagactcgatgaaatcaaggatatcatggagcacctgtataagctatccttcaagatacgcaacacgagatatcgttctctcaccaacaaagctcttctgatgaaagaagaggatccacaaaccgggaaagacttgttctcggcgtatgccatcttcgatcgtcggcatgtacaagagtcactcaatcgcttgcgcctgcgtccgtcatcaaaggaattcgctactgaacctgcacgaaacccaagtgacgggtgtttcgatgtgttagatgaaggggatcgcctgttaaatagcgacgattttctacaagatcgcttagcaaaagcaatcaccaaccgcagaaagtattttgcatattggtggagacatgctctcaagctctcacacgttacggatgagctagccccccaacaaaatttcacaactctcgtgaagcctgcgagacctgtttccggacctccaaccacaccctcaatctcagggtattccctaccgactccaggggcaaaaaccctggtttcaggaaccgatttctccttgtataaccgcaaattggacgaccagctggatacagagaccgtgatttcctatgcgactacagcatacgacgttgacggaaattccccagaactacctccacctcctcccgatgcggccacgaagccagagtttgtttgtcagtattgctgggtggcttgtccgtcgagacaaggaaaaggaaagtcatggcagtaagtgtctaagatcattgacaggataggagcatcgttctaatgaatgttagagaacatatccgacaagatctccagccgtacgtatgtacctacgaggaatgctcagatgccgaccgcatgtacgccagtcggcacacgtggcttgaacatgaacggctagtccaccgccgaatatggagatgcttcgaacacaggtccttcagctccaggtcgaaaaacggcttgctgcaacactttttagactgccacaaaggtctagatgagcagcagatcgaaaacctcctggatatagccgagacgacggtagccgatgacagacaaacctgcccattctgcttctcggttggaccttttgctaaggggtttcacaaccacgtggctttccaccaggaacaattcgcaacatttgcagtaccacgaaactttgacagcaataaagaggcggactctaaaaaatccgaagggattagatcagctggatctttgcgttccgttgctctagatttctcggacggtgatagcagccttgacagcgacgacagcgacgtatcagtgaaccaactcagaaactccctgctaaactctgcgaatttcggagacgctgcggctgttaggctgctactcgagaagggcgctaatcccgacttaggggataataatggccagacaccgctattatgggcggctaagaaaggccacgaggcagtcgtaaagctactactcgagaagggcgccgatcctaccttaagggattatagtggccagacgccgctatcgtgggcggctgggaatggtcatgaggcagtcgtaaagctgctactcgagaagggcaccgatcctgcctttaaggatcatcgtggccagacgccgctatcgtgggcggctaagaagggccacgaggcagtcgtaaagctgctactggagaagggcaccgatccttccttggcggatacttatgggcagacgccgctatcgtgggccgctaagaaaggccacgaggcagtcgtaaagctactactggagaagggcaccgatccttccttggcggataatgatggccagacaccgctattatgggcgactataaatggccataaggcagtcgtaaagctactactggagaagggcaccgatccttccttggcggataatgatggccagacgccgctatcgttagcggctgagaccggccatgaggcagttgtaaagcggctacttgacaatggcgccgatcccgagtcgatagcgtgggcgcctaggtcttcagaatcagattcagaattagacgattcggatcaaggttctgttattcccgaccgcctcgcttcagaggattttacctaaatcaccgtgatttctggggataaatcacgtgttgcagaatgggagggtcacttcacagctgaaactaggcagtctgtgaggcgccatgtcgatctgaaaaagagaaagaatacattcaacgaaacaactaagacgaggagaaggaaagaagaaagtgtaaagtagaagcagccagttgatataaccgacaaacgttgcaagcttcgaacatctcgcttagctatctaacaaagaatctccgaagtaaataatgcaaacagtagatagtcgccgatccatagagtcatagaacagacaaccatgcaaacggtaacacagcccatatcaaaatgtaaatgagtataaaatgttgggagcaattgctcccgagatctaggtatcctgtaggattctgatataatcatggtacgtgttcataactgactacatactacttggtgaatagggatatctatgataggcagtctgggctagcaggcaagacaagagcgacacaataacactaaccatctaagcaggttagctagtaagcatagtcatacagacgacagtaaccatcctgtaaaaccctttcattccgtgtgtggtgtgtaggcgtgtgctctgtacgctgcattctatctgatatgaatgtcccgatatttatccctgcagaaacaaggcaactatcatagttaactagttagttggcactgactaataatgcaatagaggatcaaagatgtacggaaatgggccatttctgttgatactagtactatgtaaatcaaataaactcgatcagactcaagataaagacaaggaggtggatccggaatggaaacgctattctcaatccggtaaggagtgggtgcacagccccacagaagccacacccccttatttggctgtggctgcaagtttgaccttctagaattgtaactacattaagcgcgtcaaaaacgatagcctgtataccgctaccaaggataaaagcaggaatccaattgagtttcttcccctatgtcgtattgaagatccgaagtgttgacgtcaagttgagcagagtctgatatcgcggacccacatacatccatggatgatgatggaacgcgtgtgccaagacttcgatcccatcaaccttggaagttgtagatcttagggtttatggggatgtatgggcttttgggtgggaatctatacccctagctctcggaggaacactaaccttatgcagctaaggaagtggatgacgtgaatctggagctgggtacgtacggggtaccccatccaggtggaggttaatctgaccttacaccttacatatgacacaacccatagagcacccacccagcaaatcaaatatagctgcaacgttctaggctgaaagggacaaaagaaaatcccaacgagactgggagggagcagatgtccgtgttagttgtggccaagctgtgccacgacagagtgacgtcaggtgtcgatcaccgccgtagcagtccctacggaggctctttttatcgcattgggctcctggtggcagggcctggttctggtgtccagctcatcataatggcgctattgtcccttgtcttttatattccgtcatcccttccctcctactttgacttttctttcccttaccacattttccttcattccagtgataccccttgttttgtgcctacataggttcaataaatatagttaattgtcagtgagtgactctcgtttgtcctgtatgcaaacggcatctctgaccctgtcttttagtccatacataatacctcaccccctcatcattggtctgatatacatacttccatcatgtctgtgaacgttcccacaaatcctaaacagaaggagaaggtatggatgacaatgcgactccattgaaaccacactgacagagaatctccaggatatcaaccagaagcttcaattctttggtatctaccatggtaagtccagcttcacatcctccaattgaccattcctgtactaactgtgtctgctatagccttcaagaatagcaagctcccctcggtccgtctcaatctcctaccgccaatggccttgtcacaaatgctaactaggtctcctcccacagaacaagcaatgcgacattgctttgaacagtgtcttgaactccaaggccctcaaatctccaccaaaggagctctcacgcgatggaaaggtccttgtggcagatctgcgcaatgtcatcgacgcagcgaagaatatgctcttggtcaagaacgagggtaacctcctgcaagactttgtctggcaagcccagaggatgtccactggcaatgcggatgccaatcgccctgggctccccatcgacaaggaagccggtcagcaagatgctagcaaggccattgatggcctcaagaccctgggcacgctcatgatcaccaacggagagtttagaaaactacgtaagtgaacttccgttcgcgaatcacgggcattcctaacaacgcgcagtgagcgacgccatgacactgggcaaagacattgcggccgatgcttctcaaaaggccgccaaccaggttcgcccttcgcaggatgagctttcgcagatcgaccaacctgcagaggacaacgtgtggcacgagaaacccaatgtctccaaggatgacctaaagtccaaatttaagaagaacaaggctgtatgtattcctagtgcgctataattcggcacatactgacacttagctcaggataagggaagcgctgcttccgcttccgctggggttgccgaggaagagactggcgtgtcgccgcagagcaagaagagggaattatccgacaggaccaaggcttacttgtccgagaaagttcccaaggagcgtcgcgagcagaccatctggcgcctgaagaagatgatcattgaaatccagggtcatgaagactgtaagtcacccacaatctatatcgacggcaaagatttactaacaaattatgcagaccagcaagccgttgagaccctattgaacatggctgagcaatacgccggacacaccagagacctttccaaggagggcagtagctctgcccgtgacgtcctgaagagcgacgatgttcaggctgttcagtacaatttgcgcactcttatcgaacgctttgccaaccacacctctctagacggcttcttcgaatcgctcaacgccatttaccgtgaggctgagaaggaccccgaactccgaaactggttcaagaacgtcagcaacttgattcggtatgtgaattagatgattttccccaggataaaagctgaccggacatagcaaatctctgcgcgaacagggcttcatcatggaagaggaatgcaaccgccagtggaacgatctttacgacaagggccgttacctcctgcgcgagcgttaccgcggttactccgaccgcattgtcgacgaggtcaagttcttgggtgaccaatttgagcaggacgtgcaaaaccaggcccttgccgagtcgttccagaagctattcaaggatctgggccacgattccagtggcaggcctacctttaagccggatcttcttcgggatctccgcgatgtcatcattccgcaatttttcgagaacgtccgctatgttccaatcccccgtattgaagtagcggatcccatggttgatgttgtaatcgagaacctgtgcctcgagggcgacaacttgatgcccaacgttatggagttcggcagcgacaactacttccgctggggccgcaagaagatctccaacaagagtgataataagatcatgatttccatgtctggtatccagatggatctgcgcgatgttggatactacatcaagaagaaggagggcttccccaccatcaccgatcgcggtattatggacatcttcctcggcggcgacggtctcagcgtgaaactcgctgcctctaccgcccagccgagcgacaaggagcacttcttcaagcttgacagagtggatgtgaccatcaggaacatggatatcaagctgaagaagtccagccacaagctgctcttttacaccttcaagcccatgctgttccgcgtcgtcaggcctgctctgcagaaggtcgtcgaggcccagatccgcgaagccttcaagaagggtgacctctttgccaaggacgtccacaccgaggcgacgcgtgcccaggaagccgcccgtgaagaccccgagaatgcgccgtccatcttctcccgctacgccgatgccatccgagctcgcatgcaagccaaggcccaacaggccaagagcgccgcccagcgtgatacccaggtccaaaccgtcatgaccctccacgattccctgttccctggaatcgagcttcccggcgctgtatccaccaaggccaccgagtacgccgacctggctgccaagggcgcgcgctgggagtcccccatcttcagcatcggaagcgcagccgagtccagaggcatcccatccggcgggcccatcaccaggaagactgcccgccctgctagcagcagcggtggaaatgccgccgctacttcgaacgctggcaacgtcactaacggcaacagggtctccggatcccagccccgtggcggcttctccgatgaggttgataaggctttcgtcaatggcaagcctcataccttgggtgattccttcaagcatggcgctgatggtgtcactaatactaccgtgactaacggagctaacaattttgcaaccgctgtctaaactgtgtggccaaaatcggtatgaatttgcgtaatgttattgtctttgtttcttgacctttttttttccctgctatgatttccccttgtgcactacggatgttttattatttgtactagtagtatgagttaatggtagcctaatacatgatgccatcgttgcctgcgttctccagagtaacctcgagctttgaccaaagctaactcagtagaaacataagtacccagagtcgtggaaggtaaaataagcttaaaagtcattcatcgtcgtctataaaagaagtaaactgaactccactatataagaagcccggggaaggtaagaaaatcccacacattcatatcaaatcacaaatcaaatatctacgtgcttaccgtctacatctgatcaaagtacttctgccaccccaactcgcgcaacttggtacccttcaactccatgttctcggcacgggcagcctcggcatacgcctcgaccttgcgctgaatagccgggtcgaaagagccaagcacacgcgcggcgaggagggcagcgttgatgctgttgttgatgccgacagtggcgacggggacgcctattatgaaatgttagatatagatcgggtcaaagtaaatgggtgtaaaaggagagtaaagtgggaaataacgtacctcgaggcatctgcacaatgctgtacagactgtcgacaccgtcgagtgagctccccttaaccggcacgccgatgacagggagggcagtgtgagcagctgccataccgggaaggtgggcagcaccaccggcggctgcgatgatcaccttgatgccgcgcgaggcagcctggcccgcatactcggccatgtaatcgggcgtgcggtgagcagaggtaatctcaacctcaggctcgatgccgaagtaatcacgcagcagcttgaggcctgggacgagggtcttcaggtcgctgtcggagcccatgatgacggcgacagaggggacgggcttggagggaccggagggggcagccttggttttgatatcggagcgctgggcgcgcatggtatcgacgacgtcgatgaggggctggatcaaggtctcggcttcgtgcatagtcgcggcggtgacggtgacgtggcccattttgcggccaggccttgcggcgcccttgctgtagaggtggatgctggcgttggggatggagagggccgcttcggtggccttgaggtgggagtcgggagttgcgccgccgatgatgttgagcatgatggagggctggcgaagctcaaggctcttgggcgggatgggcaggtcgaggatcgcgcggatgtggctgtcgaattgggatagcgcgcagccttcgattgtccagtgcccggagttgtggattcggcttgcaagctcgcagagcatgaggctgttgtcttctaggaggaacatctccacgccgaaggcgcctttgccttcgaaggcagagacggctttacgagcgagagcttgcgcttgctggttgatggcttcggggacgttgcgggctggcgcatacaccagcttgcatattgagtcctcttggacggtctcgacggtggggtaagagaggacgtcgtccttagtcttgataaccatgacggcgagttcctgtacaaattattagacatgcatggcgtggtattcaactgctactaaccatcttgaagtaagcccatttttccgagtagagcgggcggtccttgagagcctctagggcctcgggaatatcttctttggaattgacacggaagtttccttgatactgtcaacaaaatgtatacccttcggcatcacatatgactcaccacgtccgtcatatgccatagtcttcgacttcaacatcatcgggtagcccaattgctctccaatctgagccaattcctcgggtgtgttgtccaccagctcccggtggtcggccatagggataccatatttgcggaggtgctccttctggttgaacttgttctggattgtccggatagcctgccagctgggttccacccgcaccttcgatgcaacctcctcgagagcgtaggtgtcgacgtgctcaatctcagcagtgatgacatcgcaagtctcagccagtttacgcacggcatcaggctccttaaaggagccggtcacatggccgtcgtgcgaactgatctgcttggcaggagagttatcgacgtccaggatattgacctgaatgttcaatcggttggccgactcgacgagcatgcggcccagttggccgccgccaaggattccgaccttaggcgagttccacatgatgtcggatcgaaggaataaatgagtcaattgatcgagatatgtaaaagagatcgacggtgcccctccactccgaaaattcgtggagagtcacgtgtcgctatcgataagctcaggccaatcaccgattcgactgccgcgccttgtcgcagctccgactctctgtttccccatgcacagctactgaacaatgtctctaggtaggttgacccatcacggtcgcatgatcagtctcagttgcaataggccttgctgatatcaagattacagacgaggaagctctccaaacagccgccaatggcggccccatggatttgtacgtgaagctggcatgtcaagatcccaaaacgctgagactaacgcgctgatatagagcaagatggaacggcatggctggtccattgattgagcgactggaatacgtacgctatacttcgatattcctgaccgaattatctaaccagtagctccagatcgtatacaatgtgtttcccatgcctcaagcgcgctccgaacccatcggccagcaattatttcccaaccattcttcccaggcgaaccccattctacccgaaaatagcaataaggaaaacacatcccccgccgatatccaaacttcgccccaagcgcgaactgtctctcccccacagcccgcgagcgcgggtggccagcttccacctccgcttgcatttcttctgagcgccatccgttcatcgatcaaaactttcttcgaggagaaacctccacataccatccagagactcgcagagctagtcctctacccgaccaggcactataggacgttacccgcatacctacgtgctgttgatcgcgttgtctcagtgacaagctccgcagatgttttcccatttcaaacgccggctgtcgcgattgctcaaaccaacgggatactgcttcctggcgatagcaccggggtatatataagccctgagtttgcccagggtcttgggagcgatgaatctctgggtggtgcactacttactccgatcccgtggttagtcaacgcctcgttcgaaggcgaggactccaatggcgatgcaggtatactagtcgatggtactttaccctataaccgagccactggttttcttttcactaatgttttcgcataggcactgaagctttacctacacagcctggggaacaggacaccacaaccctactatcagtcgaaaccgacgaaacggttgctaccgcctcaccagagctatctgacgaggttcctcacgcccgtggtccaatgctcctcggcgtggaagacatgggtctacaagacggtaaaggcgtcgaggtgcgtcttaccgcagacggtttggatggtgccaccgatgtccctacaactgttactcctaccatggcaacggaacaacaggaaaaagccgagtcaactggtgacaaggacggtgatatcgtccttacggacactgaaccgaaagaaggggaagaagccaagaatgaagcagagccccaagcaggaaatgcacggtcagaacccactggtgattcatcccaagcgccggacgccgagaagacagcataagcgagttctttttcttaatatggatttttctttttgtctgattttcttggttcatcctggattctagcatcatgagtaacgacctacaagattatatcgattgattttcaattaagggcttttgcaatgcctatgttctctatataatagctcaagcttggtgatagaaatagtaatggggctgcgactaatcctgaagcgtcataaatccaatccgttatcacctccatccttaggacacagacagttcataatatgaaatggtgctagcaaaaaggggaatcttatcttccagaaagagaaaaaccttagtgatttatactaactatctgagacatcaaatcggtctcaattagggcaagcacgctcatccgtacctgacatgatcaagacaatatcctacctcgtggattttcctgaggtcttcttattcagcactcgctaaagacccctcagtcatgtatatatagctataagatcagatgcattatcgggttgattctctcacgtatcgtctgccagaaaaacttgtctcctgtgaaaccttaaaacaccataattcacctgcaacgttaacttgaaaatccaacagcaattttactcgcgagacaaagtcgcatatcaaaagtccacatgacgctgttgtagtatacagccaagcccgaatgcaaacaaaacaaacaaagaactaagcattagccacaaacggccagacaaagaaggcccagaactccgccggcaaggtctgggccctcctggaaccgcaaaaaggtagaaatcatttaatatacgggctccggtctagacctcacagcttatttccgccctgcagttcgtctacccgagccgtgaaaatcgggtcgggaagggcgggtgatatacacccaggtgggattaagtggggatgtatggtgcgtcggtcaattgtatataggatttgggtgggggtccgccttggattcatatatgaaataaagcttacgagactagcactggaacgaagacccgacacagatgagaggaataaaataatatgttttgtaaatatgtacctgacgaaacaatctctccggcggtgaaatggaatgcatgatgagcccacggtggatatcgctgacgcatatattgtataaagtcgcacgcaagtcgccacccaatttaaagaaaaccaacgccaaacctgtaaaggtgggggacaagtgcggtcaatccgcgaagagtgtagcaaaatgtacgatttgaattttgaacctcgttatagacaagtgggaatcgtgagtcaatggacaggcggaaaggtgaagtgtagaaaatagaagaggagatggccgggtttagccaggtcggcccgcttgcacggcaagcatgggttggggttgcgagtacatgcgctgccgttttgacatgttggggttatcggtggcactgcccatttcggacatctgacggcgatgcggggggcgtaatggaggcccggttggcactcctactggtggtgctgggtactggacgccattctggtcaacagcgtaggcgggtggaccggtaacgtatggcccttgaactgccggcatgttcgttggaacagcctgcatattttggaattggttgggcgactgccagttattcatcgatccagcgggcgactggcctggagagctgtcctctttgatcgactggtttgttgaactttgagttgcagctgccatggtcacggcggcggcggaaggtcgtactggctccatccctgggttctgtggcgaaatcttgagatgatccaaatgcctttccagcatatcgagaagacttttgcgggtgaatggtttcggaagtacatcatccattcctaataagggttagtggaagacttgattcaattttgatgttcgtcttaccatgttggaaatagagctggatgtcgtcgcttcggatgttcgaggtcatggcgatgataggagtgcgatcaaattggcgaatgagatggcatgccgacacaccgtccaaattcggcatgataatatccattagaattaaatcgtattttgagccaccctgaattttgttcacagcctccaggccgtcaaactagaggaattagcaacgttgtggtcaataggacagactgatgacataccgcggtatcgataacacacgagaaagagtacaagaatttaccgccaatctgccgacaagtggcatcgtcttcaaccaagaggatctgagggctgcgcacccagccagggtccacattcgtgctttttttccggttgtcggcaaactgccgacgagcatccgtatcgatctcctgcttggcgggcattgggtaaggaacattgttgatatgctcgctgtacatgggatcgatgccgtttgtagcgcccacgggatagaccacttgctccagatcgccggccattttagggtaagcaagtgctgggtttggcggtacagttgccgcgggacggagggaaccatttcgcgcatgcggatccaagttgggagttgacacgacggtcttttgagggtcgttcatcggatcgacgccgttcatattgaattgtaattcggcgttcatgtcattcaggagcttggaggcttgctggaggggcgatgagggttcatcgtcaactgcaccaacctgagaagggctcattgtcgttccgggggcttggaaagtcacggccttgctatctcgacgctggcgcgcatccaccgaaagcaagtaggtcatcacctggtgaatgacattctcgtggttcagaaccgtcttctgcactcgcatcacttcctgtagcatgagctggtgatccaccgtgagctgggcatatcggtctgatagatgttggatctgctgctgttgcgcgacaatctgctggttaagaagatcaatttgttgcgtggggacggattcatcgctcggttgagtttgttttcgtggcgcgggcgcctttcgtcgaatgttgtcgagcgattctttgctgtttgcgcggaactctgggtgcttgaattcccatgcctgttgttatgtgagattcggtccaatcaagcttcaaattgggaggcctacattctgcccgtatggtgactggccattttcttcattgttttgtcgaactttgtggaaatcgtacttattcagttggcggacgaaactggcaaagttgctgtgtttaaagtgcttcggcaggatggtcttggtgaatttctcgcactggaatccgagttagccacgcgtcaaagagaccgaagctggacaaaaacacgggcgcattacctctaatacgacaaaggaatccccttcatcgccccagcgcacgatggacgaataggtcgggtcctccagcatcctgtggaaaagatcagcttaaaagaccaacacggtcgcaggatgcgtccgaagcgaagcaagacttacttatacagcttgcgtacctatccatagtgttagccaagatctctcacagccatagcggacgactaacaaaatcactggagttcccagcgggggcgggattggaagaggtctggccaccgtccatgctgggctagacgggtcgcgaccggtcgaacaggcaggtctggctggtttcgtcccaacgcggataatgtcaggtctaatggcagttcacatccaacagcggaaaacaagtagaggggatagaaagccagacctgtcggagggtgggagaagggaaaaaatgaaataataacgggggtacggtcagttactttagcggtagagccaagtaccaaagttactgtggaggtactgccttggtacattcaatggactgcgatgtttcagaacgcaccgtgggcttcaattgtgtagggctgctctttttgtttgtattatattattctccagcttctatttccccatgcaaggaggttgaatgctcccagcacccaggaaccaacgaggggcagaattccagcaggtcacaccgaacagagagaggtaccagccaggtattgtatacaagttcgtgggaaaaaataaaaacttcaccagatcctattcgctatcaaaagagacatgcagcatgaattatgggctgtcagtgcgcacgagatggaggggaaagcaattcccccaatgatgtctttatatgcgcttgatatcggtgatcagccctgtcatcgtgtcactgtctctcccacttttaagattaagattaaagatattggatatgctgaatcttatgaatatgcgatgctattacgagtctccaccgcagaacaagaactaccccataagactttgctacgtggttatggctaaagccaccgaagcacctcgtactccatagtccatagtctagatgctggtgaacagcccaacgcacgagtttgcaccgtagcacattgtcgtaaaagcgcaaaatcacctccatcacctgagcctcgcgagtcaatcccatcttcacgcttgctgtgttgaattacaacgtcgaagatgactgcatccttcagcaggggtgttatgatccaccgtgtgacggagcaaggatccactgcgtcatggcggaataggatgcgacttcatatcatccgattcgaaggtagctagtccgccttgttcttaaaaagtgcttctgataagtgacagctcatataggaggtacctgcggtatagcctccgcaggtcgcactggtatccacaaggtcagtgtctgtgccgatatcgatgatgtgcattaaataagaagtaaggacgatagctaggatggaaataaacaagcaaaagcatagacatagacatacatacatatcacataggctaaagagagttcctaaaaatacatgcaacggccatgacgaaatccaagctcgacataccgcccttccaaggttgctcttctccgcattattccaaacacttcttcttctcattccttggtccaatatataacttcaatcccatcctaactcaattaatcccaccatgttcgcccgccgtatcgcaaccaacgtccctcgcgttcgcgcgcaagcttccctcttccacagcaccgcgcccgcgttcgtgcaaaagggcgacgccatccctaacctggacgtcctggtcgagaactcccccggtaacaaggtcaatttggccaaggagatcaagaacaaggctgtcatcattggcactccagctgccttcagtatgtgaactctctactgtgatagataggatccggactgacattcttaaggccctgcgtgttcaagcacccacgttcccggcttcatcaaccaccccaagctcaaggaggccggtcaggtttttgtcatctcggtcaatgaccccttcgtgtaagctatacatgtcgaattgcagcgcggaagcgtgggaacatttgttgacgcaactatcatataggaccaaggcttgggctgcttcccttgatccttccggcaagagcggtgtaagttgccattctttgatgtatttttatcctagcaagctgacattgtatttcaacagatccgcttcctgggtgacccctccggcaagttcaacaaggcgctcgacctcctcttcgacagcagcgccatattcggcaacgaccgcagcaagcgctacgttcttctcgtcgagaatggaaaggtcaaggaggctttcgtcgagccggacaacaccggtctccaaggtacgctttcttctatcgagggtgtcgttctatgctaacatcacacagtctccactgccgagaaggtgctcggttaaagccactaaatagagctgcaatctccttgcaaatagtacaagaccaatatagcatgcggcacaaagtttattttaatccttgctgcacggcactttgtagcgcaggattttaatgtacaaatattccatcctttccaacccggccaacgcctgaaccgatgccagaattaaataggcaagcctgtagttgaatcaatcgagcaattaagaatcaatgccgattcgttcctgaacaatcttcggtctggtacaatttcttccatatccctctgggacgagtccatagtccatcatatccccaccctagaccaattactgctgcagagcctgccactgctcgggggtatagcacttgggagtccaagcatgaatagcagcgatctcggccttgagcgcggaattgacgagccggtgtcgcgcaagcatagtcttgctctcgaactgaggtgaaacaatcacagcctggaaagcctgtccacagccacctaaatcaacccaaaaagacagcacgtcagcgggagatcaacggagccaaaaaaaatatttcgacgtcatagcgccgttctcattctaaacttcaatttaaatttcaatttccatacccgatagatcctcaacctcgacatgctgcgcctgcagcgcttcagtcaacttgttcttcagcgagtcggtggtgattccagatgtgtcggccatagcggcgttgaaggcggcgtaggagcgcgcggtgagggaaaatgaagaccgctggatattgtgagggcggagaagatagcggcagcttctgctcaggacggtcaaggaggatgtgcgggagaacatgaagtatatggtcggggaggagaggcgagagaagacgagagagggggataaagtgccaaacccgaggttatcgcgaagtatgggagttgtcgctcaggtgctcttagtattacaaattcagagcctccggtcggctgtggctggtgggttcacgtgtgtggctcattctcgttttctgctcttcttcggtctgcaaccctcgcttggaacatccatctatgaattttcttcgtgctacacgtcgatactctgccatgtctatgctgaaatatacagaatgctcgccattcaccaatgttgtggtgagcgctatgagaaagctgtaattcaccccccgcttaatccccaagctccccgcattgcatggagagcttcatttaacctctgatatgtagatacccagaggcattggcagacaagagcttcgataatacaggatgcaagttgctattattttcaaatatcagttgattggcttctgcaatggactaacacgctcaatgacagtgctgctcgaagctcctttcgacaaatcccggatacagaaaaactcggtcctcctcactattgacctcactaaggccgtagccgatgaagccattaaaaaccaaaactcggttatcgtcgcataccgtaagacgcatccaagctagcatactagcgattggaccccaaacctaacacaacaccaacaacacacagacccaatcatcttccgcggcctgaaatccctcaccctcgccgactcccaacaaagatccctcctccacctagcccaacatggcatcagcgtctactccccccacacagcagtcgacaccgtccccggcggcatggccgactggctctgcgacgtagtaacaggcaacttcgaacctacagccacacctaacgccaacatcgaaaccagcctctcaagcctgtacaccgccccaacctacccagactcacccatccccgccgttcgcgggccctcctcgcgagcgctcccgcacaccatgaccacaatccacccatccccgcccgctacaatcccagaaggcttcgagtcagccggtgccggccgtctggtgacattcgccgagaaacagcccctcactgaactgatcgacaatatcgcgcgtggaatcggcctgccgggcggtatccccatcgccatcccgcagggccagtcggttgatgctatctccgtccgcacagtgggcatgtgtccgggctcgggctcgggcgtgctcctcaagggaggcgaactccctgatctcctgctgacgggtgagatgagccaccatgaggctttggctgtcacggaacgtgggtctgtggttatctcgctttcgcatactaactccgagcgtgggtatctgcgttcagtgatgcagcctaagttgctagtcgaagttaagaagcagtgggaggatgctatctcagaatctatctgggctattcaagctagtaaaaccttgggtgaggctccatcggcggctgcagtccagattcgggagatttatagacgggaggaagttgcggttcatgttagtgatgctgatcgtgatccctatggtattatgattttgcgcggtaactaggcgggctcttctgtttcgacatctaacaatactacaaaacgaaaagcgcaaaatatagtcacaattagagacattactcaacacactagggctagatctatgcagtacgagggagtctggtaatatgtcaagaaagtggttgaaatgagaaggatatcctagtggtagacaatgacagaaacaaaaaaaaaggtgtcttgaggcaagagagaacacaagacaagatgaaggacccaggtcaaacatcgaagaaatgcaggctaccgaggacatgaaaaagaaagcgtaggtctttcagttaagccttccgttcatggcttcaactagcccactattcacggatgtagggagattgtagtgagtatcgagcaacgataggtatagaaatgaaggaaaggaaaaaaatgagaccgggtaagaaccagacgaccgagccccgaatgaccgaatgacagaagaaacagaaagaaaaatgagataaatggtatccgcgtgagtggccttgtcaggaatgaatcaagaaagaagaggtccacgagatagtgactacagatcaatcaggctgccgccaccgcgctgttgctgttgctgacctgcccaggggttgttattggcaggttgctgctggaaaccggtctgctgcggcatgcctgtgaattgttggccgaagaatgggtttcccgtaggagcagcgtgtaggcggtccaagcccaggccggcagaattgacgaatgtgccaggtgttgtgtgctgtgcggggattcgaaggtctccgacatttccgaaggtatcctggccttcgcctgacccaagaagggcgttgagacgagcgtggtgagggttgagtggcgacgtactctttggtggctgtggggcttggaagccggcgatcgggttgggctgagagggttgggcgaacagcgaactttgaccatactgcgagttgttctgcgcaaactgattggttgcacggtcctccgacaaggaattgagtgttggcgggcctgtttttgcatggttgttgaattgtgtttgagtgcgctgagcgaatgggttgtttgatcctgtcggcatgggcttgagggcatcagcgggctgcagttgctgagagtggctgccggcccatgggttattgctccctgccgtctgatagttctcctggggctgttgttgttgttgctgctgctgctgctgctgctgctgctgctgctgggagaagacatccgcaccgtaagggttattcgggttaaatgcggtgtgctgaggttggagagtggcctgcggttgtaaaagattgttctgttgctggccgtaagggttctgatcaaaggccgagggctgcgtctgatagccattggcgtaagggttattcatgccggtgggctgattctggaatcctgtcggctgcgcatactggttgttcaggtagccagttgacagaggctgctgcgcattgatcgggttgccgaaccagtccacagcaccttgctgttggtagccctggttgtagccggttggctggacttgagctggggctggggtgtcgtcgaagagagattgcgcgttgctctcctccaattcgcgctttcggaggtcctcctcttccctgctgagcttgatggccttggcaagagcctcgtcgtcctgacccgccattgtctccttagcccgtcgcctgcgctcatcctcagcttcggccttgctggcttcaatagctaagtggtattcgatgtcggagtcgtcgtccccgttgcgtcggcgtcgctctctgcgcggcggttccacgggggagtttccgtatccttcgtcgagtccgctcacgcgagtcttccagagtttgcgatccgatcgttcactgcgcaaacgatcttcatccagtaccagtgcagttaattcctttgctgccacgcgaactacataacaccaatctgtcaattttgcgacatctctggttttcaaggaccaacttaccgttttggccaacatcccttgcttcctcgtcgacgtatgtgaactcgcgcaaagtcttgataatatagacgtttttccgggcccacgttactaccaactccgagccttcgtggagacaatagtccaagaccttcagcgacttcagcacgtggcgccagttcttgcccttatcgttgagtcgcttgtcaagcatgtccatgatttcgtagaactcgttcgggctattatgcaaatggcattagcgacgttcacacagttggtcgcagacacaaactcacctcccgaaagtcatggcggcgatctcggacatctcggtacccgtagggccccaggggtcattactagtggcttgaaaagtaagttagcgacttggtcacaatgtatgcgaaatgcatgggcgcattgcagcaagcaacccccgcaaaaaagacaggggcaagcgacaacagcggttctgcaacatgcggccagaactcgataatcggcgaaaaatgcgatgtaaagaatgtcataccatttcggaccttgacctgcactgaggaatatccttttgtgacgtttttaacgcttcgtacgactttagacatggtggcggtgatgcgacggtcgcaagtttaaggtggatagaatggatcgtaatcggtcggaaatcgatgcgagcagagtactagattgccaagcacacacagcctctttctcgtgtcgcggcccaagatggttgttaagcgtgttactcctctgaaagggacaggttggtctatcggtccaaaggggtcaggggtttgagctttgaagctaaaagaaagattggcaaacaatagtggatcgtcaactgatgaaagatgtaaagtgaaagagaggagaggggatggctcgaacggggggaatcagagggcttggcagtgacgaagcagtttggaccaaacttatactgccattgtttaagatctacacttggaatttcaggcttgaaggtttcttagttcatttatcatcataagaagccctggaatataagaaaaataagttccaataccacttgaacggtctaacatgtatagtgtatgtataactacgtcgccctcgtggccggaggtccggtctaatcgccgtcatcttactttttctcctttttcccctatatatagcccagaataagcaattatttatctgacctctacatattgatcttgcttaacatattctatcggattatgccaattttggctccaaagctatgtagatataaaaaaaatggcatgtttcccgccacatgtggcggtctgtaggcgagaaactggtcaggcaacagtcaagtagaaattacaagatactattggtacaacggtcatatacattttagtagtatgtattgcccattgttgtatattaaagtctcgcacggaagaaccgggctacgtcattgctgttctagaatagtacaacgctccgataggtccacattggaccctgtcatgtgatacataccccggaagaaaccaagtctgtctgtaagagactcaagagagaaaaatctggggatctagggagatctacggtaatagaagaggcaacatatacctggccagcacaagagacctttgtttacgcgcttgagaggtatgacgtcgcgttgtaaccatctgcgaggacctcgtctggaatccatggtatcactccctcatacggattttaagaaatctatcgccccaagacgagaatggatgcattcaggtctccctgtagattcctacattacatccaggaacagcttgtactctagtctaggagttcaactcggctacgctcatgtattccgtgggactcgtcaagtggcaatgagagccacgacttcaggaacgtccacgagaaagcccggttttttgtttgatgcagacctacatggacctcataacaatggtaatgttatgatccctgtggtaggtgaagcagcatatgctacggcacactctgccgacgctgtctcgtgggctacggtgagatggtggtcagagagatggagaggagagaagaagaagagaagaatagaaatggggggaggggctcttttatacacccaacaaaccgtaccttccctgtcatgtcattgtcacatgcccaccttcttgtttacattgtttacacaggaaggagccctgaagccaatgtcgcattatgttaattccttatagtgcaattgaagtcctagaatgctatcctctagctatcccatcagacagagcaccagcaatactctcaataaaccctttcttctgcatcccatcgacccattcactaggtatagtgtcaaacccatagaaagagcctgcaagacctccataaacagcccctgcagtatccgagtcaccacccagattgacaactgccaacgccccatccttccaagtatcatacttgaagaatgcccacagggcacactcaatggtatcaataacccatccactactcgtcatatcacgaggctcctttgatttccagtcgctgatagttccgtatctagatggcgacaagcgctccttcagaccagcatgagtaaatgggaactcagagaccgcttgatagagctgctccttcgtctgacctatacccaatgtatatcagcgggtattcttcaaagaaaacatcaccaagaaaccaaccattcataaccctacacaccaactccgtgtacgcctcacaggcctccacacacgcgagcgaaggatgggtaatccgactatgcgttctagcaatctccctcgccagtcccgaatcccgccagtaaaccaacccaatcgggacgatcctcatcaagctcccgttcccagagaactcatcgtgatccaatttgctattgaccaacgcctgggccacgtcgagttcacctttgtctatgccacgcttcgaccacagcttcagcgaggtgcgggtggagcgtcctacgtcccatgagcggttgattgtgctgaattggcctttggtcagccatgcgacaaagttgtggattgctagcgtgtggttgtattgcatttgggacttgttgaatgagcatgctagggctagtgttagagacccgtcgtccgaataggatcttgtttatgttagctacgaggtatttcctgtagttagatggtatggctgggatgggaactgaccccgctggttgtttccaggatcttaggcatgtgatcggctcgaatgttcctgcggctttgaattggacggggccaccgagggcgtcggctacgcagacaccccagatggcgccttgggcgcgagatttcgatgatagagacatgttgtaataatgtgataatgtgatgttgtgatattatgatgttgttatgtttttcttgcggggtgatttcgtttctaaatactagcagggaagatccttggaaagtcagagtcatcaggacgcactataggtaaaaccgtggcagaacctcaataataacatggaaacttaaatataaagccgtgactcaatatgagtcttgggagatgcgttgtatggagtacggagcctcattctaggtgggcctgactcacctcggatacgaagcggtctatgttgtatattatctgtaatattgggacctgtgaattactatatgcggttagttttgcctctttgagtttagcgccccaatacgctgtcacgtgacctaccttcaatgccgccgacataaagacactgaggtggatctcaagacatgctaccaataactggtgtatttctcgttctgacaaactctgtcggattaaccgtatccgtaaatgtatgcgtccaatcaatggtttcaatcagtctgtatttctgtactggctcagctgacaatttatggagcctgattacataaactaaaacataaacaatgcacattctcaggatcaatagatcctccggtatccttcggtatacttactgacatgcgtgaccacaggtcatgtgggcccgcctgagagttcagtagggttagcagcctgaggccacccgccaagagttcttatgtgccttaagggtttcagtaccttaccacttccctcaacttacccacttctctcttaccagtaccatactacttttttattagttacataaccaccaacattacttgtcatataactaccgctctcatggtgaagtacgcgatgcatgtaagtataaccctatgagatgatatgaaaaggccccagaaaagatggaaatacgatagattgaagatgaaactaacagttattcgcattcagactgcataccgatggtactgcaccctgaaatcgagggagggtatagatctccctcaactaaacgatcccaatgtgagcatactatttatctactaataaaatgaataaaactaatagagaatagacacagggggaaatcgatctattcctcggcgagcgcttttgtcgttatgccaactgcccgaaagatgtgggttttctttgacatttccttcatttctttgttaaagtactagtaaaaaactaatactaatttaccttacagactcctgctacgtctaccaacaatctcaggaagcattatgcagacaagcatactgatatgaaattggcgagttcgggtggtcgtccaactttacaggatgagcatgatgccgttggtatggtattcttctactacttttttactagtattctgacctctaatagagttctacattgcgatccgggatgagtatgacgcgaatgttgctgctatagtacaagtgaagcctgagcttcctcgtaaggcagatggcactgtgagttacttctaatttactagttttgattatatactaatattggaatagcttcaccttaccaatatgcgtaaggtatctaaggagcttggtggtcaggttccttgtgagccgtgtaaggatgcaaatgatcgtcaaggtaagatattatcaagaaatgtatctttttactacttattaactagtattaggttgttgccgtgaagctaatgctgaccggtgtgataattttgagctgtttgtaactagtgctgtagaggaggatgaggaacaggataacgaagagggagacgaaatggaagagggagaggaaatggaagagtgatactactagccttcctttctttactggtgaagaactagtattttcctactttggctgctattggtggagttcctgcgaaaggttgttattatgcttatcctgctttttactagtgtttctctgtataaaaaataaaaaaaacatggcgtttgccataaccctatagtgaaaagtagtataaaactggtaaattgaagatattaaacattattgtatatgaagtaaccctatcgcaaccctatctctagagagtattttccctttcccgtagtactaactgtctctcttgttgtttaagatcctccctcaattttttaacctttttcctctgatcttctaaactctcaatgctattctcatcctggctgttattgccagtgttgactgacgtagtatgccgaagattagatacagcgggtgtgctatcaatagtcagtaattagtatcatactagtaaagagtacatacattgcacgacttgttgaacgaccttgtgagctgcttgctccacggccgcgtttagcctttttggatcctgcccgaggaattgaatgattgcctgaagagttaaactcataaagctctttatcctcaggggccacatcatcatctaggacttggtaacgtttccgtcgcagagattctaattattattagttagatgccagtaaataagtagtaaatatacataccctctcgctgtatactcttactaaaccgtgtctgcatatcatctgtatgataggaatgtctgatatcgaaagcttcacggctatggtattgctgtacgtcggtttcgtcgaggatctttgacctaaatgaatgtaagtaaatggtagaataccagtaaataattaatattcactcacttcgtgactgtaccaaggagcgtatcctgtgtacccatatgataggatttatagtggctttgctctactgcatttgtatgctttcgcgcttcctcgaagaacatagagtctattggcgagcatgcattacaaagcccagctgcaataacatcgatcttcttatgctcagcccaacccttaagctcagggttatgcgctataaatattagtaaaatactagttttttcaaatggaaatatataccgataataaggtcagccaactcctaataattctgtcgacttttacagtccattaagctggctagtcgacttcttccctctatatgtgagagatcttctgggtcccggcttgctggcaccaatttgttaattgtacgtatgaagtgtatcttacagaagataagaacattcatagtatgccatctccaaccaagatcccggttattggttttctggtcagtctcctggagcatttttccaagccctaatactagtaagttactgtaataatagtagtaaaaggtataatacttacctgtcatttgttttgggcacatatcagtgataatagaccttattccactaccatgtagatagtggaacttgatcttcttacctatacagcgctcgacgagattaaagacatttccaaatataaaatgatacgcttttgtagtctcctgatctgtgaaaactcggaatagcgtcataactagaagatattagctttggatactgatataatagtagtaaaacaaactttttccatgctttgggacaaatgttgcgaagataacctcgttaaaaacgcctttcactcgcttatatgacatatcaacttcgaatgaatgtaatgaagcaaggatctcgagctgttcattaagggcacaaaatataaaggcacctttttcattatacacaatctcgcgtacatagagctaaaggataattagcatagtagtaataatatactagtaaaacgcacctttatagccggatttttctccatctcgaagtaaacacctactaaatgtctacccattggatagtcaattgctctcctttttgtaaggaccacagaaaatcgctctttatttgcaaagctctggtatagttcagacagggtttgagcgccgtatctggcggcgaggtctcgaaccccatcactccgaagaaacgcgcctatagatactaattagtatctaataaaatagtattataatactagtaaggttacttactaagtgtaagatccgatgtttgtccccgagataagagattccaaagctcttctataaggtcgtatggtggcttactcggtggcgggggcgggtggttatgtatccctgcagagtaaaagatagcatatggatgcttctctatatcctttggcacaaatgtacggaatttaactgtgcattgtgggaattgtctctggatcgcaccgcgtccgcctaggtgcacaacatctataaaactagttagtcaataataatatactagtaatatgaattcataccgcaaaattgggctcgtgagctagtttggtagattgcagtgtatacttctgtggtaacttccctctgttccttttgaagaagactaatcagaagccctatatctagcctgttccgctttgtatataatgttgtaaagtaatgattcgtgtggttactagctgagccgttagaacaacgaacgaatggcaattcctctcctactacattctagttattagaggctatatattagtaaagatatagtaaaaagaataagaacgaatttacttacctggtggttgaattttccgtagaccatttcgcaggtagcgtctgcttttttacaagcttttctctccaaaaatttctgtcgaagagcatcgtagaaactaaatagttgttagctactaataaaatattagtaaaataggtcgcatacgctaccgcttcacgttagggttgcgaatattggtatgactgtcgagcatccctctttatagagaacatacgccctacaagctcttcattaacctctgtatgggagaggttacggagatagtcgttaagatgaacacagtgcttcatgccggaatagtaagatgctgtcttcgtgacttggcaaccaaggaaggagcagtaaatatcactttttccgccatcacgcctactagcgtactggacctagtaaaatagttaataactagtataatatcgatgattatataacaacttactagattaagtgcatttttcttctcttatgaagagagatgtcggagattaaccacatatgcatagcctttcggatgagtacgcggatattctggaaggagaggtacatattcaatctctgtagtagatattgcgtcgtgggtagcttctgttaggggagttggttcatcttccgttccctatttgaaaaatattagtaacaaaccagtaggaaactagtaaatttcttcaaaaacatacctcgtattcgttgcgctcatgcaggatccgatcatcggatgcattgtaaagctcgacatctgcctctgcaggctcgtctggttcaggaataggctcggcctttataagctcttcaagcttatgatagcggtgtttccaccaggtagattgataatgcgccatggtaactactagtaaacgaattggaacaatggtttgtaagtagttatacgtgcatatccaaagatatatatattcgatgtagagttatttatcagtaattaggtagtaaacaactagtaaataactagtatacaagaatgtatcccttgtaaacataccacatatttcataccaaaacgggatgatctaatcaaagataccgtacatttccagaccaaacagcatttacataagcctaaactaggggtatcgacgtgagcattgaccgcctgaccaacgtgaggtctcaggcgggcccacacgacctgatctctcctgacatgctccgacaaactcttactgccttaggcataaaatcccaaaaaggcttagtaccactaaggtcgcaccccacaatattttaactggaccgaaccactttccctttctctatcatacttctatcctcagtgatagattaccatctactttctacttcatcatggctgagcagcttgctgagcagattgctgctgatgatcaccacatcttgtctgaattcgaagacccagaacgaaaagccctcattgcgcgatttgttgagagtgatcccacgagattgagtgaggtaccactacgtaactatctcgctttgtggttctcagatatccaggttcttcgcgggttggtgtctccccataataccaacgaggcttttgagcgcttgggtgtcttcaaggctaccgtgaagtcaatgaacatctacgatgtagctgggacttgtaagtacccccagaaaacgtgcaccatgacaccaaactaaccggaactgcttcatataggggctggaaaaacacaggctaacaagactggcgacaaatctcacatcagctccgtctattcatcttcttccgctgctacgcccgcttctcctcctctagcgacggttcgttccaacgtgctctcaacgcacggaaccactgggagctcaacgccaagggtcccgatatttcggccccgtggctcggtctccccagctggtactttgccgcagcgcgaggcagaccctaggtttaaagtatgtttttcaaggagatcaaagaggaaacaaaactgatctcatcgatttttagagcttagaacgggataataaacaatgtgtgttaaccaagcgtggccagcctaccatacaaacagcacacattgtacccaacaagctgaatcaaacaaccaaccgtcaccttaccaagcaggattgttgggcgtggcttgatgcattctggggtaaagaccgtgttgatcaatggaaggcacagctgctgacaggggatgtgatcggaactgagcgagtgtcgaatttgatcacccttgaaatgcaaacccatgaatattgggaccgcgcctcgatcgcattccgtcctgtgtgggttaatgctacaaatacagagatgcatatcgcattccactggcttccgtttgtcaaagatggaccattggcaattcacatcaagcagaccgagcttgtaccgacccaggagcacatctttagcgacccatactataaacctcgtatgggccctgggatgaataacatgcttttccatacggagacactcaagccgatcgtctctggctatgttttcaagatgtccaccaccaacgcaaaggagcggccactgccgtcgatggaactactgcaactgaagtggaacttgtcccgcatcgctgcgatgcagggggctgccgaggacgaagacagcgattacgagtccgacggaggctctgttgccgttcccgcaggtcctagaacgccagttagaggacggcgcatgtctgatgagaataggccacccttccgttcctctatccaatcattgtctccatcaaagttgcagaatctgtcgttggaggatgacaacacatccagctacctcgttgagtaacgagttcctttttcttgctgttgtatctttgacgatgccacgactcctgaatagggctgacttggtgagagggttcggcttcttctgttccttttaacaatcatactatttttaccattttagacccgaaattcattcaaggtctatagaagggcatcttcatattattacgtgtcgaattgttttacaccacagcttaccacccctaagccgatggccaatcagagagaacgaaccaaaccatcgaaataacaattcgacattggtacgcacaacaaactctccaagccgacccagacgacgagaaaccgaccagcaattaggccaaagccctaccattcttacaagccacgcttaactcttccgccaatacctacctatccctcaaaatcttctctttcctcttcatacaacttcctttatttaaacaaaacacactgcaacatgcctactaaacgcaaaaactcactggccgacgacgataccaggccagtcagcaaaaggacgaagccgggcttaagggctcacgctaaacagctaatggacctcatgactgaaactgatatggcttacacaaccgcggacgaagacaagtatacccaggtgatagaatggtcgcagagagaagccgataaaagactcgacgccgacgccgactatactgaacgcgcaatatagagcccaggcgaagaacccccgactaactttggcaaagtcctgaccgcggctgagatggcagaagcaccactttgtatccaaaacgagatcgacaaaaacggcgaatgggttccgccaccacgcggtgtgaagctgagtgacgaaggtgtctatctggccgtcaaaaacatgtctgctgtagagcgcggagaaagattcccagtcgacttcgacaaaaatggacacgtccgagctacatgtatcccagaagaccctgcaccactcggttgggcacacgacctacctatgataatggtggcacaaggaataatcccactcgttggacaactgcatgccagaaagctgggcaacctcaccttgaaaaccgacgccaatatcaaaaactccccggctttcacggtcggcccagtggtcgcatcgaaatccgttgttgaaatgagcagatcgatccagcgccaatatgtgacccacaagcccgaccgggggtacaaaatggagtacaacttggataccgcagttgacgtggtctccaatgaccaccaggacatggcaatcctcctaggtgactgtcacactggcgcccaaagccgtctaccttccagccgacctttcaagttataaaactctatcaccgcacagagaacgttacatttgttctgagggtcgcgtaggtagaagagtttaatgtcgcagtagcagaccgagtccagaagctctgttacgggtatgtgcttcggaagatcactctgaaaagtgggattttgtttacacttgctcagagaggagtcgttaggtagggaggtattctgtggaagtaagataccgggtcgggtcctagtaatagctgacctgagttggatggtagtaaattggacatttatactcctgtgataaaaaaaccgcgaatatacccaatgataccgatagatcacacaaaagacatctatatctagagtattcttatctttcgttcgtctagaaattttgcgcttagccgggaatttgctattaagaaactatgctctacttagctcaatcccctttagaatagaaagagcaactgtacgcgttgtatctgcttataaatatcgttactaacactacggcgggcgaatagcttaaagtattgataaaggcggcgccagtattcgtcgtatgattgaagtgctttctttcgcgatgtcttaaacatccagtcaaaaaagttcacataaatcgcttggtcttccagcagaagatagtccacgtagttatggttcgattgaatgtaatatctattccggtattagtgcccagccctaaggctttcatttcatcaagattaaacccacttccgccagtaccgttcgaccacggcgattcctatcagtgttcttggcttgaagtttggaggaagccatccgagactgcggaaatgctgcaatctggcttacgtttcctcgcaaaggattggatcggtccagaactggtgatcaacttgagctggaggggcggatacagtcgccatagggagaattaagagacaaaggtcaaggtttcgattctatgataggagtcttgagaattaggtgtatagaggtcgatcgaggcagcggaggtgggatgggaaggttgttgaaagagccaccggggggagggcaaacgaagtatcttatagcagctcgaccaggctgggcaaaaatgaaggcggcctggatttgtatgcagaggggagccattttcggcgtctttttggtcgccagtagaaacagtggggggcttacagctgatcgaatgttagaatgggaccgctaatttagcgtgaaggaaaatatattaatccgtgttaatccgcgtttcgaccatctatctgctcagaggggtcttagcgaatgtcgagatctctctttatactaggatgtcttcatagcttataatagacgttcataaagaccccatgatcattatttacagtattatctttaccactaaatcctatcttcttctgtactagggtattataacccctaaaagaatcccgacattcgctgatgtctgacattcgccgagctctcggaattcggattaatacatgttcctctgggccaagaggcgctaaaaattagcggtcccattctaacattcgaccagctgtcggtcgcaagggactaccactaaatcctatcttcttctgtactagggtattataacccctaaaagaatcccgacattcgctgatatctgacattcgccgagctctcggaattcggattaatacatgttcctctgggccaagaggcgctaaaaattagcggtcccattctaacattcgaccagctgtcggtcgcagcgggcggtcaggcggcgactcgccgtctaagttaccggtggaaaggcggccgtttctggcaccagaggcggtcattttcggcgtcgttttcacaggtctttatattctagatgtaaatgaacaaggcagtgcacccatgcccagatattaactgcacatctaattatctttgcgtcattggcaggccaaacaatcatccggaccacaaatgtatagatcttttatgctatgcaacataaaaacgggcggtgaagcccagttccgaatgaaaattaggggtttgggagtatatatcagagtgacatgggataaattgggtatggttttatgaaaatcacataaaaccgaattccaatccgattattgccagcgatagagagtctgtggccagaatgatgttcccagatcgacgcttctgctaacaagaaaaacataaccaatttgcttgtgcttttattcttatctccaagtccattatttctccatgcttaggtacttcgcctcggcgcccttgatgcacgcaatgttggcaccgagcttgttgatcgtctcaatgtactcatcataggggtccgagtcgaagacaataccaccaccagcctggaggtacgccacgccgttcttgaccatcatagtgcgcagcgcaatacatgtgtccatcgcaccgggcatctcggcggagccatcttcgttcgcgctgttatatccaaagtatccaacggcaccagcgtagacgccgcgcttttcaccctccagctcggcgatgagctgcatggcgcgcaccttgggtgcgccggagactgtaccagcagggaagatagaccggaatgcatcgaatcgggtcataccgggtcgcaatacccccgaaacttgagagaccaggtgctggacgtgtgagaacttctccacgaccatcagtcggtcgacctgtgttgttgtggggtcgcagacccggttcacgtcgttgcgggctagatcgaccagcatgacgtgctcggcacggtccttgagactgctgcggagctcctcggagagggcggcatcctcctccggggtcttgccgcgcttcactgtacctgcgatggggtggctgatgatacgcccccgctcttcctttaccaggagctcggggctggctccgacaagctggaagtcttgacagtcaatgtagaacaaataaggggaagggttgacagtgcgaaggtggcggaagaggttgaatgggtggagagaggtgggccgtgatagccgctgtgacgggacggtctggaagatatcgcccttggcgatgtgctgcttcaatcggttgacgtgaccttcatatccctcctgtccgatgttggatgtatactcctgattcggaatgatcgggccctggggcggaagtggtgtgcggtcctggagtagcttctcaattgtcttctggatgatggactggcccttgagatatgcggcctcgatatcggcatccgccgagggaatgggaacgtaggtgataactttgacgacttggaagaaatgatcgaatgcaatgatggtgtcgtaaagcataaagaacgattccggcactccgaggacatccttgagcggccgcgccgtcttgggctcaaagtatctaacacagtcgtatccaacatatccgatcgctccggcggtcaacggcggaaggaccaacccaggtactgtcgcgacgcggaactgagaaagctcatcctcgaggtatgggaggggatctgctgctgggccatggccctcgccggtcttgatgacctttctggggtctgtatgggaggaagtggtaagcgacggaatcggaccaaagactcccgatatcacccacctgcgccaacaaaactatatcgtccaatggtctctgtggtagcagcactttcaaacaagaatgacaaccgcgagctatcgctgcgagtcagcgattttgtccagcatcccatgtccccgccttatcgcgaatgttggaaagaaccccatgactcacttctctgcaatcttcaagtatgccaatgtcggggttagaaggtcggcagcaatcgaagccgtgacaggaagtaggttgggagggtactcggagttcctcgactttgagataacttctcgcgccgtctcgagggacggaatggtggcgatctgactcattggtcaatgagcggaaacaaaatctcgggggtgtcgaacagtggagaaatccagtggcaagacggacgtgtacttacagcagttgccatgttgttataagtggctgatatcgacgatgctagtcaagagaaaggattgaatgggcggtgggaaaatgattcactgtgggtgggtacatgtatgtattgacggccgccgcgtgcaggaatgcgccccggcctgcatgtatcggattcgacctcggaggtttaacaagataagcaatggtgatataaattttaggcttcttatgtatgagttgaaaatcaaatctcgcgcgaccttgaaaggcttacacgtctcacaagtgtgccggcgtttggttatatgcagccaaaagcggactagcgtcgaggggtacatatcgattatcgataaaggcctagcgacatcgggactgtaggatgtacctatattgtaaatacaaacacttcattggagaatcggggtatttccttgattatcagacactaacagtgagttttagaaatcacagagcccacccgagatgggccatgggaaaaaaggcaaaagaaagagtccaccatcgccggtccatgtcattcgccgtgtccacccaaaccggtcccaagcaatgcatgccattatgcattttctaaagaaaaatgtatgttcacagaaggcaaaaagtaaaaaaagaaaatcgggaaaactatgaagggtgatatgtcttcgagggaaagagaaggcttttcgagcgggaatgtcggattagttcaagcagggcatgagtcgtgagttttacgtggctgtttcaaacccactctgtcatcgctgtaaattgatgattgccatcttcgagagtccgtcagcatggggagaattgatacaggtaaactagaccagggagcttacctgtttgtcgaagccataggcaagtcgttttccatctgcatcccaggaaagggcccgatgggggtctgattttgaatagccattctgttcatggtgtccattgtgtccattggtcatgcggtcggcttcctctttcttcacctcggggctagttgcggtccaggtagacataagattaccgccagtctgtttagtgttccagataaagagcccgtccttgctagcagcaccgagggcatatccatcgggggagaaagatccggtaacagcggggtttgagtccaggctcagctgatggatactcgtgtagtcctttgtatcgaggttgacatgccagaccttgaccttaccatccgccgagaaagaagcaaattcaatacgacgggagtcatattgagagctgatgtcaatgccggtgattctatccttgtgggcattggggataagaatgtcgtgggtaggtatccaaattgaagcactcagtccagaagccacgatagcaaccgaatgagactcggtttggacacaacgaataaattcccaagtcgcgttatctttgggagagggaaatgtcttgaccaagcggatgctgttgtccacttcgcattgatagactgcaccctcacctgaagcgaatgccagattgcgtccacaccatgcgagatcataaatatggttctcaattatttgaggttgcgggaaaacatctggtcggcggctgtcgtcccaaagcgcgagttccgatacgttatgatttgaggctacaacgatcagttgtgagctacccgctgcccagtgcaagcccgtgatcagccggggtacttcgggtagtaaatccacggcgtctccattgacgttgtacatggtgatagtgcccctgtcatcagtgcaagtcgcgacggccaatttatcaccaatggcatcccatgctacggtcgagacacttgtgtcacccctcttgagctcgaggattttcttctgcaccggttccgacgacattgacaacttccacaagctgcaaaagaggtcaccagctcccactaccacagtgggatcccgagggcgccaaacgacgtgggtcacgtgatggtccaaattcagcaaggcggtgtccggggtcaaatcgatgggcttggcgggggcgatctggatggaagagctctcgccgttttgcagagtgggcggtagttcgggaatctcctcggccatgctgacatcaccatcctcatccatatgatcgggggtatttggctgactttcagttcgcgccttgtcctccatggattcatcgctatcagtttcgtcctttcgggtgtcctttccggactcggcatggccgttcaccgggcggtcgcgcgcaagttgacccggcgaaactgggtctgtgccgaccgcctcatcgcgactttccgccgatccagttttagttccaatttcaaagggctctggtccgaaaaaaaaatcagacggtgaaaggcttttgtgattgccctcctgtgcatcgccattagtttgggtttcaattgaggaaaccagaaaaaagtaaattattttttccgtttggcgcgtaaggaccgttcaaattgaaacacataccttgtccaaggaggattccatttcgtgatattgcaggcccttctggaccagcgataccagcgcatgggttttaatgtaaggcgcaaacgggagagtctgcggatccgggaaccacgcgcgctgcaaagacacggcggcatcgccatggcctacgtcgagttagaggtcaattggacgggcaaagggggcaatgtgaccaaccggcttcttggaggtacctcgaaggatattagcgctgcaggagatgcatgggttatattgcacttacctccatattaaatagttgacgtgatgcgacgtgaggtcaggttgtgccatgattacatgtgcgactagctaagggccgcggacatgccagagagggaagagctgttttgccgatgaaaatcaaagtggaggcttcgatgcgcgagcttcaggaacacggaacacgaggccggaagggggtgggaacttccggataaacagaaaatgggctttgcttgtattttccgcaaagaatttgagacgtctgagtcttgaagatcgaaaagaaagccaagacaagggagaaattggagtttcggggagggggggtggggaatgaaactgaaagagtggagggaagaagaagtggaattgaggatcaaaaagaatagaggctattctgtaatctcctagaaatagaaaccgagtattcaaatcgagacgaaagagtgagagggagaggaaagtgaagatctgagattaaaggatccagaatgtttggcagaagtccatttaacacacactagccactttggatcctccctgtggcgtcgactctccacactttttttcgaacttctccttctctccagtcgtttttctattaaggtatatgacattgggtatctgcatgatatttaaacttgatcaaacacctctgctattccaacccttgaacttctacgacttcaaattactctcccgctaagcccctaaaaatggggttctccacatatcgggggatttcagcacgagcaccctttgcaggtacataggtacttgattgattccctcacttcttggcgttccctttccgatttagtgctcaaccctgccgctttttgctcggcgtcaagtcgtgccttcgacaattggacgaaaacattacccaaactggacactccacaccatggatccacgaagtctcatccatccgtcgtataaggaatctgtatcccccttcacactcatgcattggtcctatcctgctctcttatatatgatgcgctcggtcggaggaaagccgtcttcattaggggcatattcacattcatcggcaaattcatcctacacctcgttcaagctaccccaattgcttgtcggtcgtatcatcatcagtatgggcattggaacggtctttaccatggttccgtatggcactataaaagccaccaaccggggcaagaacgtcgtgatcgatggtatcttcattaccagtggcaattccatgctactggaacaattttggctcttctcatatcgaaggccagtccgtgtcatggatagttttcctagaaatccctgctgctctgtcccttgtcttgatcatttttatatttttcttccctggattacctcgccggctcgttttaattggccagggaaaacaatccgtaaaggaactaacttgaattagattgaaatcgatgtatcgaaaatccgacgcgagatctcatctgtcgatttttctccggaaaccgctcaagttgccgcttccttcgaagatatcttcaccatgcaggatggaagctattctaccgttctgtgctgtgtctcgacttgcaggtttaaactcaagtgaccggagtactttacagccgtctccaagcagaacctgggattttcgggacaattgccccgtatttcggagttcatcgcttcgttcgttgtattcttcgctattgaccatttttatcgacggaggctgttcctattttgtggaaatggcctcacgctttgcatgatatctatgaccatcattcccaacttctctagtaaaaaccacgcggcgtaggtggtcgacgcgtttttcccgttcatctttcatcgaggtacaaggttaatcaatccatagaacccgttgccttatggcataaccttaaacaatatttttggccatttcaacaatatacttaagacatgcattccttaggcaccaacccctccttcaatccccaaaccaccccgcgattcagagaagacatgccatgcgggccgaagtcaaacgtgcattccttcttacaatattcttattacaccttgaggcacgtattcgtcctgccaaacaaacacctcaatcaagatctagggcgagcaccccgtccttttgctgctcagacacaccttacgatgtccagagttcttgggcgagtatcccgagaccctcaaattgttagtgcacgcaggacagtacgtgcactggtcctcaatcaatcgtgcaacggaatgggcagtgtaatagctcagatcggtataagaaccgtgataaggaccaaccctgagattgcacgaactgtaagtgtaaattctccttatgttgccaatgttcgaccgcgactgggacatattctggagaagggaaaggcagctagacttgtacgcaaggttacccgtactgcatttaatgccgtatgtaacacgcttgttgaggctctcctgggcttcttcgggagtttgctgggcgatagtcgtgaagaggtcaatgatgtcggtgtgcgaatctgtcttgcttgtgttgccgtagaataagagggcattggcatatagctctggctcggagcttctgtagcccaatgcgtcttcctcgatactctgaagaacggtcaagtttgtgccctcgatgatgccggtgctgctgtccacatccccggaaatgtggtatctggcccacactgcgtcgccgaatcgtccctcctgtgtggcgttcacgtattcgcttgcccaaggctcgacgatagggaaccctcttgtgtcattttgaaccacctcgtcgatggtgaagtctagaaacagctgttcgacaagctcggtggtgctcagactcagagcaatagcggcccgttggtttagaagcagagttgcgaggaggtaaagcgaacgcatagtgacagggttgaaaaggtatgtgtatattcttttaagatgggatgatcaaacaaagaagaatgaggtttgaagtggggtggaaagaagtaaaccaaattcgggcagttatttgaatgttatttatacatttcctgcctcctcatctaattctgtatagcagcatatttaggtcaaaggtccctagacggctgattgttaggagcagatcagctgaggatggcagtagtgtatacatgtattcaggttacattgcatggcttatgcagtagaccccaatccttcgaacgcaatgctcaccttagaggcagtggcatcagatgtcaattggttgactgatgtacttttttttctgtttctgtctcattccttcaaaatacgaggaggatgccgcaggattccccaaaaatagggaaaactatcatattacataaaaagaaaatataacctgtgagatatcggatggagtaagtgggagagacactaccactataagcttaggctattggacagaagcctcacccccgcatggtagtgttggtcgagttgctaatgtagccatgtaaccatctgggcatattcaaagctaaaaagcgccgaggccatgtttttcgccaaatggtgggcatcatgcccccacaacaaagccgtgccgccctcttgcttactgtaagaaagccttataatgtcgatcatccaaacatatattttaaagaagacaaatgatcatgatcgaccggttaaactgggtcttggcattgcttagcggctttgagccacacaataacagaaccatttggccccagcacgtcgctccaggcttgacgttatgatatcatggggatccaaggcagaagcatttttgcgtccactctgagattgtaataaacgtatcgtgtcttacaaatgtaagaagacaggccttccgtttctcccaacgcgtctggtgactctgatcatcataatccaccccttgaaggtttaactctgtctggtatgccgctattccgcttcatgcatgcgcttcgccccgattgtgggccatgacaagcaacgggaaacgatgattccggactaaggatgacacggcagctttgcatttggagtcgatgacagtgtatgtagatcaagcacctgtgtacagccctttagaagaataattgatggtagaatatgacgagaagaacctggctcgatggtttctttctagaatccaagcagctcaatgagacgttcgttacatgacaattaaaattccaattcatcagctagaagctcagcacgatgttcagcccgggcttgagcccgtagctccttaatatcttgattgccaatgcgggtaaggaggtcaatcacatcacgatgtccatccgaggcactagtacgctcgtagacggacgagagcgcttctgcatagaggtctggatcgcccaccctgtaacccagtgcatcttcctcgatcatctgcagaacggtcttgtttgtgtcctcaattatgccatcatgcacaccaccatcgatatggtagcgtgcccacacagcgtcgccgaatctgcgttcccgtatagcgttcacgtattcgctagcccagggttctacgatcggaaatcccctggtatccttttgaagtacttcttgcacagtgaagtccaggaacagctgttccaccagctcagtctcgctgatactcatggctctctatcgaaaatatgttatttagatagtgttggtatgcaataaacttcggtgcaaatacctgggtattggcgtttctcttcaagccaagactcaaggtcaagtagagctgcagtagatcgatgaaatggaagatggaaatgatcggaaagtgagactgtcgcttccaaggttagtttattgtctgagtcagggcatactaggcagcagctcaggcaacaaacctcggaaggatcatcgaattaatgttacgggcccacagcggggcagggggtcttatgtaatactaaaggtactggcgctaagcctgaatgggattagtcggagataaaatcctacttaatattacataatcacggcaggaagcgaaccttaatggttatagaagtgggtctttcgacatacaacatacctaaattgcctcttacatattatgaatagtattactcggaagtgtgggcgtcatggcctattaggcactatagtgtgagaattgcggctagcagagtacatacctaaagtaatctagcggggattgtgttggtagcccttctcttactgtcagaagaaacaaacatgatggtcttataccaaagtgaatgacagttatgaaataagtcagccggaaataagagaagccattcctattcttatcatcacatggttatatcatcacgttactattcaattaaccgagcccatgtcgtggtttgtcttatttgtgaatagtggcataaaccgaccgccctcaggatacctataagaaggtggccctgcccccagaacttcctcttcttttctttcttcttcagctctctttgcctctggcttagatcaagtgtagtatctgttctattcagtttaatcgctgaatgttctgcattgcagaacgtcatgattattctaatatttggacctcgcgacttggcctctgtgcttgcacacacctcgttgcacagtgtcactgggcttacactacccccgatcgacgcgaactccttttcatcaactgttcggcttgtccgggcgattggagaagatctctgtttaggatctacgttcttggcaagagtgccgattaactcaccgcccttttgaagagtggatctgaaatactgccggtaaatattaaccaatgaaagggttataccccgatggcatacatactatgtactccgtaattcagatcggcagcgcatggtgtcagaatcttagccaggattgtaagcagagatcgtggatggatacttcagttgccgggcagggatacaaggagtttcctaaggtttgatactagcgggttctttgtcaaacagacagggaggaattgactgcaatgtcactttagtatctcaattcatatacaacaataaatgaactattggagtagtgaatcatcagccttttctacacatctaactttaagaaaatagtatagaagccaaagcagagttcattaagaatcagatatttaaaactcaaggcttggagtacaaggtggcaacttgcaagtacatcctttctgagcaactctacgggcgactaagtatggtattgtgtatgtctttttttgatgtcttttttggactcttttatactaccttccgaaagatctttatactgctttttgaaggccttaatcagctatataagtagctctttgtttgtttatagaatgcgacttcttctctcttttattctctctctgtttctcagccacgcatcacttttgatactactattatatggcttttatactcagtccctcgtttaactcccaatacaactatatattgcatacattttcgttgatactgaggcagaacttgccctcccagatgaagggattatcgacctagttcatgagtatatctcggatatcgaactagatcccgacatgagtgcaaactcctcgtcctatggtgaaaccatccttcggcgcaaatcatccccggatatgagccttgttcaactattaaaaccacaaactatgccactctcgaaaaatcggagggcttccattactcgccatattactaggccacgagatcgcccatatcttggaattccgctgtattcgtgcctgcaaattccacactgaagatgaaccttccgatacaccaccgggcattagctgcggtgaggctggcacggcctgggatctgaggtcctttggtggtcgtatttatccagtctgctagcctgacggtagtctatacaatattcggagcttatgtcccaagagcacctcttggaattttgacgcgatgaagatgaatgaaaattggcggaggcgcattggaagcagaagcagtcgttgaaagctccaattgacgcatttgctcgatttgcacttttggaggatgacctttttggaggaccaggtcattctttttgaattgatctatatctacttcggatatggaactcgagagggatggtttcagagaagattaaaaggaatcataccttgcggaggccagaaatcacttggtgcttcagttagaggcttggggaatatgcgtaatgtttcctagcaacatctatggatgctgtaattcaagccgtattgctagttgtaagcaccatgaaggtacatgggtccctcacttccagtatcttttgaccctgcagctaaatcttctaatcgtccacctcaaggcttccgaacttatgcttagacgattttcagattatccattcatctcccagagaattcgcagttaggttttttggtggtaccgtggggctcgtcgacgagtactggaatgaacggggctcgcaggcagcttaggattgggaatacattgaagatttgaagtccagttacattttcaatcgagaatagctcatacaatgaatgctagctgtgatattgctgcttccttggcgacgatgttaagactgtaacatccggcacatgatttacatcctgacaataattgcatgcgttctgtttgaaacaaccaaatctggccttcaacatgtcagccccaaaagtaaactcgtcaaggttttccataacccttgctagaagtagtccgaggcagcacccgacaagtaaaaactacagacactagtattgtaccaccctggtgaccagggatgggctgtcttcctgcttcgtctcaacagtggcagcagcggtaacagcggtaggatcttgtgccttaccgcgagagcaagcgctgcaagaaccagggcagagccaccggtggatcctccttagtacaaatgggcttgtcaatgggacacgagaatgttttattgtaaccggacagcttggggagtagtgcgacggctcatcaaacttgtcgagaaattcagagtcgatgttggctgtgtaaacgtaaagggtatcggccactattccagaatgggctaggacctgtaccttcttaggtttaataaatagtgcacctatccaagattgtgcagaacataccttgaaagaattcgctgtgttccgagccatttgctctgtacttagtgagcacgagtcagccgttctcgaatttgcactcgaggtgatatctgcatccacatgactcgtctgattctcgggtttgatttcggaatctgctccttgtgactcctgctgctgcgcacgccgttgcccctgggctagagcgatcagtatcgccacgatgtatgggtcttcgacgggattttggggttcaagaagtttcagctttttctcccagacacggaaaccgggttcgttgcttctatttcttttgcgaggtggcgtgtaggacacgtgcttctcgcgaagtaactgtattttaccgaacgtgatataggcaaggtttggagctacggagttgttcgtgaagacaccttccgttctgattcttgcaacagcccgacgattaaagtaaaactgcaggttatcagaactagaagcttgttagcagcaccatcaatgccgtgaaatacgggatatgttactctgaatattcaatatcataagtaccaagtatggttttaacagctgccttcttgacatccaaggcgaatctccctgccagatgatttgcactgatcatagcccgacgggatcgccctttcactggctttatctgcacagcatcatctgctgccctatctccatggaaaccaggatcttgcgatgcgggttgtgtttgtgggttttgcggcctcctctccttctggggccggaactggcacgtcaaaagtcgtagttggtttgaggtccatgctatcggccgtacatacaagcgtgtcccacagttatcacgaagaattgcctgaatcgaatctggttggggtaggcccctgactgtcgttggtgggtacatggtaagagactcgctttgggagggatgaggtcgctgcgctggaggactttcaatatcgtttccagcctttcgcttggatccaattattgaagaaggtaagtctgacatttcatcgagataattccctaggaatatgcgaatttggtgcagtggtagtggctgctgttgaatcaatgattttttgacgcgcgacgcgtaactaggtaactgtcaccctgcggaccgtcagccacaagccacagctccaggctccagccctaggctctagccccatccttgtatagtactacaggggtccaacaaacatccattatttacccctcagtaaccccctcacttttacttagcagtggcgtgaaggctcgaatgaccatcaaatttgagaaactaaatgtatattccacatctcgaacgttctttgagaaatgagctgacgcgatatctatcagcatgactaccccgatttataaagctcgaagccgagccgaatttggacgtctgtctaaggagcatgagggcttacggcttatttcgcagctcaagccaaaggaagtgatgcgttctgctagcagatggtcattccgacatttgcttggctttcgactgctcactctcccagaaaagccctttctggagggttttaaaactgatcacaagaatcactgcccagtgtgtaatactgaaagacagagttcccagaacgttgaccattattggacgaaacttctcacctcagattgtccaatcgactttcggaaaagcacggactctgagcttctacgcctaccaggtggttttttttgggtccaactcgcacgagtaacccgctcgcaagtcttcatagagccgcgggtatatcctcagcgcgaacgacgacctctaaaagcagacggttttgttaattctacatccgccattccagggtcctccccttccatgaagctcagttcatccgaatttgaggttgaccttgacgacctcgacgaggatgagcatgacgctcggcgaagtaaacccgaggaagtcaccgttcacttcttgatgtcgtttctgcaattcgctttgaacctctgtctattacaggatgaaggagaccacgaggtacgaccgcgggtcgaacgccttaaagctacgatccacattgctggccatgatattagcgctgaagatgatggtgggatttgcagcatgtaccgggacaccgatggctggaggatgataaagccatacctggccctcattgaggcgaaaagggcgtttaaatatctcgactttgacgagcggacgggaaaacctaagccagtagtgtcaaatgagaccctggctcagtaccttgccgaagcggtgatatcatggcgagcaaaccgaggggaactgggccaagagtaagtctatcattggtttgtggcattggtttgctcttcttttgcaattgttgacatatgcttctatctacagtgtcttcctcctcgcagcgacgaatacttttctacgtgtcattcatttcaaattcggctctcattatggcgaatacatcgatgctacaagaaaggggacacagaagatcctggtcgatgacgaaaacaaagacacgtttgtctacatgaacagcactgaatggtttaatctccagacgtctgggggaagaaagtctgcgctgtgccatattctagcgataataaggtggcatgacggagactaccccatacgtttgcctgtcactcatgactccagtgtccccgaggttgacagtgattttgagactgactacaatggccccgaggttgactatagtgacgaggttatcagcggagatgacggtgatctccccatggaagaccatagcgattaggatatggatatggatagtttctgggagattaagtaaggcagaaggttgcctacgggattgctgtgcactaagggaggcattatgctatgggctcgtgttgcggaattcgaagtcggcctttaggccacgaaagaccctagcgaggtcgaagtaaatgaaatctacttacattctccttagttagttacatgtttttgttttttttttttgactattaattgtgtcccaccaaattgtgattttcgggcattgcgatttcctacctatatacagtctacctcatatggcttctgggcctcttgtatgtctttttaaatgtcttgaccatctcctgagcagccactctaaccatggaagctacatagactatttattggcctttctcccttctcgttctctctctcttacacacaccatcacaatggacatcatcatcgctctgcacacataggacacattctcatagcaagtgggcttattaccatgccgaacgaactggcagtacgagaaatagatcgccaataacacaaccaccatatggacgaagctttaccattcatgcaagctagctcaaactctttcatcaacgccaccacagactaattcacccgctggaccagcgtcgtcaacatcaaattcaccacaaagattttacttttgatatttgagtctttccttctcttttcttcatgttgagtatggaagatgtgaagggagaggagggggagaggagctccagccagtggaacaggatcagcatgctgcaaagtggtcggcagattgatctgcttctgttcttgaactgactacatatactctatccttaccttatcattacattctccttcttatataattagatagcactgactacgagctcaccctctgcaagagtaagtctaccattgggtttgtggcattatattgctcctcttttgcaattgttgacacgtgtctctatctacagtgtcttcctcctcgcagcgacgaatacttttctacgtgtcattcatttcaaattcggctctcattatggcgaatacgtcaatactgaaagcgagggaacacagaagatcctggtcgataacgaaaacaaagacacgtttatctacatacacagcactaaatggtttgatctctatgaatacaccacattgaccctgatggagtttgccgataaacacaaggatatcctcaaggatgtttccaagatcctggggtggctggcaaacgtgagcagcgtgggcaaatccgatatggagcaactgaaggccaaatttgacgacctgaaactctaagcggaacagaatcttccctcgaaggctctgggtgattggaacctggaggaggtcgagagtatctttgagatccagctgctttcatcggagaatgaggagccgggagatgagtgagacttacgacccattctccgagaggagttccaaatcccagccgcctttgacgaattctacgatttcctcagtaagtacccgtactgtggagaataaggactgagaacttcgagcgctaattaactcggagtccccgataagttgcattcaaacagaaaccgcaccctggttcctgtttcacatctactgcgcttttgtagcatgaagctgatatagaagcagaacgaatttggaaagctaagccagctatctaattgtcatagatcacacaccccttctatgaaagctatgtatgttctgttcatacatactactttacactcgtaaacttcaacacagcactgtagtctgcatatttcttccgggaattagggttaatgatgttaaatccattgcagcattctgagctttcttaagattcaagaacgcttagcacctctctctctatctcaccactctttcaggcttctatggccgtccggctcatgccggtacccagctattagcccttgaggcttgtcactccttcaatttaatctagaactgaaaaccaaacagcagagagcaataaaaagataaatagtatgtggtaaataataagaaagatgaggtgatggcatggaatataagctgacattaatcacaggtgacgtggatgtatgtagaagtagaagcgtctcgccaaacaaacatcgggggacttccgccatccgctctccactaaagtctcccacctcaactttccccatctctacggcctgtggcgtcttgcagctccaagcgagcttcaatatgtcgctccgaatcaaccttccccctgctactcgaatctgtctcgtcagccttctcactctttccctactctataacattgccagatggcggcaaattgacaccaccggcggaacaccgaccacatcgcctctcgtcccctacctgacgctcgtcccttcattcttcttctactacccctggacaatcgtcacggccaccttcgtcgagcagaatatatttaccgtcctgttaaatgctgccaccatattctatggcggcaagtacctcgaacgcgcgtggggctcgcgcgagttcagcaagttcatcgcagtcgtcgccgtgatcccctgcattgccatcatcccagtctacctgatctggggcgcagtgggaggctcctcaagcagagcgtatgcaccccccaaacgagcacatcgatcaccaccctataccaaacaaacactaaccatctaaaaaaaaaaacagtctcacccaaatatgcggcggcgtctcaattcaggcctccttcctagtcgccttcaaacagctcgtcccagaacacaccgtgacaatcttcaaaggaatcatcaaaatgcgcgtcaagcatttccccgccctcttcctcctcctaaacagcattagcggcctcgccatcggaacagacaccgccgcagtcctctcctggctcggcatcctcaccagctggacctatctccgcttctacaagcgacagcccgacctaaccggcacatcgaacggcacaggcatcaaaggcgatgccagcgagacattcgcattcgcctgtctattcccagacgtgatgcagccacctgtcgccttcgtcgcagaccagatctacaccctgctagtcaccgctaagcttctgacgccgttctcggcggacgatatcgcctccggtaacgagctggtgctggcgagaggcgaggcgggcttgcccacgctgttgaataatcagcgtggggccaggggcgccggtaagcgcgaggaagcggagcgcagacgggctattgcgctcaaggctttggatcgcaggttgcaggctgccactattgggcgcgtgcagtcgcctggtttgggggagcctagctcgtcgatgccgcgtcctaccacaccgaatccgactgcgccggctgggcagagtatgctgggggaaacgagttacaatcctgatcatgcttgagtgatcgagtgcttccttttttttttctcctttttttctataactctggcgttttgtgatgcactttgggatttggcctattggacatattcgcattcgtggcatagctggtttgtggcttggtttctttctcatactgatagttatactgatagtgtgtgcacttctgatgatgtacatgatttgttcgatttgggggtttgatttctcgctctattcattaggctgatatcttagcgcctggctttttggccttgaattcgatttgttttataccagagagcttgtatgttcttattcgaagaaacaattttactccatgaatctgtacctggaaccattttcaatcaggtatacgctgtattttaattatcctaacccggctattcgctttctgctcctatctccatctcagcttcctcttcgtctagcaacggcacaaaccggaagtccacaaagcacacaggtccattgggaccctttacgccagcaccgatcgatctgcccactggcacattatgatcatcaagctcaaccatgaactgtaagctcaacaccccctgtctatccccacggatgctgaccttattagcgacagacatagctctcgcggccttgcgaattaacgaaaagcgatagctctgttgaatgcgctcgcccatagaggaaggaggagaaacaaggaaagtctctgtgaccgtaggtgcaagcttagctttagttgcgcgagtccgggcagcgccattatcgagcaacaccttacgcatctgagattgtgtggtgccctgaccagcgccaccggcaatctcgttatgctggtcaactgagaattccacagtggattcactgaacgggccgcctgcaccggagagagcaaagtacggttctcgcttggcacaggcggacagttttaggatcgtgggggtggaggagtcgagttcggcaatggcattgtgtagccaggcggagcgcataatgattttcatgatgatagcgtcgcgctggaggggaatgtctgcttcgtcttcgtcgggctcatatgttactagctcgcaggttgttttcacgccagcttcagtgatggtgatgctaagtggggcgccgtgttgggcgtattttagggtgcaggagcggtccatgagcaaggctggggcgttgaatgcgcttgacgaggcggtgccggtttgcgtgatgctagtgtcgcggggtcgattggactcggagagctcgttgataccgaagatctttagggtttcgaggatagcggtgagagaaacaacaaaatgagggtaagcctcattttgcaattcattgtcttcttggggtgttccgttctggttgttaggttcagggtcggtcgatggattgaatgtgtagctggtgaagagtgacttgtcaagaaacgctagtccttgaatgacgcggccttcctccactgagaatcggaggccatccggggtgatttgaacagtggccttgtgtgcgaaaccaatgcaggagagcagcgtgtagagatggtgggcgttgttggagacaccagcgaaaaggggctccattttgtggcgtaggctggtagctcgaacttttcaggcgcaatactggcacagaacaaaggtaattgatccgaagatgcgtgatgactttggatatttagcagtacagaccctcttgaacccaacgcttatggtacatttgaggggacgcgcaataggaaatgtagccggttagacgtagactccggcggcgcaaatcatgaacacagctccaaaactatccgtaatacccaatcagtatatcgtatgcctaaaaatgggacgcagcgcattactaacccagatgccaatgcggccgggatgcccaaggatacgatgccgaggaaagaccgatctgtttggtgtaatgtcagagtcaaattcgttatgatttggaaagtaacttactcaagccaaatagagtggccgtaaccaatgctatcaatattagtcagagattggctatttccaaagctgtgagaaaccagaagcttaccgaggagcagcaagttgaagccgacagagaattggctatccttggcaataagagggatgaatggagttgcagaggctgcctcccagacttcgttcagagacattaggataatagaattgataaatgtaattgagggacgaattgatgcaggtcaaagatatgcgaaagtgatatagatcgactaatgttaatctggcccgaccggcggttagttgttccgaccgataccccatgccattgtcggcgcatggtcacctgggcaggtttgaaggacaaggacattatgattgctgaatcgccaaagagtaagtgaactttcatactttcacattgtattttgtcaaactatttctgacatacgactatggtatcaggttccaagcgcaaagcctctgaggaggcagcttccccggaatctgggcagcagattagcaagaaggcgcgcacagattccccagtgaaagaggtaagaggctccccagggctactatgtaaatcgcttcgcgtacctgttctgacaagtgccccgcacaggaagatggcctccttcaaaagcctccgctccgaattgttccattccctgagaaggtaccctcccatcccacgccaccatatcctatgtctcttcgtggacaatggctgatgatcacagcccgccgttcttgaagaacgccgaggcgacattgagttccgtgtcgtcaacaacgatggttcccacgatagcttcattgtcctcacaggcttgaagtgtattttccagaaacaacttccgaagatgcccaaggactacatcgcacgccttgtctacgatcggtcccatctctcgatggctatcgtaaaacatccactggaagttgttgggtatgtcacaagtgcctgctgtcctttattggttggattaggccactgacaaactacagaggaatcacgtatcgtccgttcaattctcgaaagtttgctgagattgtcttctgcgctatatcttcggaccaacaagtaaagggatacggtgcacacttgatgtcccatctcaaggtagacatgcttatggatctgcaatttctatgcatatatctgacttattgccctataggactacgtgaaagctacatctccaattatgcacttcctcacatacgccgataattatgccattggatacttcaagaaacagggctttaccaaggagatcacactcgataaagcaatctggatgggctacattaaagattacgagggtggcacgctcatgcagtgtactatgctcccgaggattcgatatctagagatgggacgcatgctcaccaaacagaaagagtctgtgcaagccaagattcgcgccttcagtcgctcgcatatcatccatccccctccgaaggaatggaagaacggagtgtacgcgatcgatcctcttagcattcccgcaatcaaagagtccggctggtcgccagacatggatgaaatggctcgccaaccacgccatgggcccaactataaccaattgctccacttgttgaacgatatgcagaatcacagcgcggcttggccgtttactcaacccgtgaaccgcgatgaggttccagactactacgaggtaatcatggagcccatggatctgtcgagcatggaagagaagcatgagaaggacttgtacccgactccacaggacttcatcaaggacgccatgttgatcttcgacaattgccgacgctacaacaatgagactacaccatatgccaagagcgcgaataagcttgagaagttcatgtggcagcagatccggaatattccggagtggtcggttagtatccacagtgaagctgttctcaaagacaattctaactctgatatctagcaccttgccgataatcattgatcctgggacatacattcattgcagcgagggtgtttttctggaacggcgttggggaattgaaatttgataggcaataccctgttgatagattacaacatgcgattctcattcatgaattaatgccagtttatgaatctcttctcaatgttgatcaaatagtctagatcgacgtctagctcaacccatggatggatatgttgatctattttcccaccaatcagatctatagatgctatgcttggtacggtggggctggtatctgtcaagctcgagttgatgtctatagtagagcatagagtagcttggatcatagcagcagagtatagaagaatatacataggtagaaggcaatataaaggcgcttatatgcatgatgatatgtgatgcaataacctaaaacctcaacgttaatttccccctgacagggcttaatctcggattatcgttgttgcggggtctcaacaatgctgatggctggaatagcctcacagacttcacccttacgtcttttgttccgataggacttgtgtttttcaatttttcgttgctttctttttttgctgttgctattgctgggccgacctagttgtgttacaacctcaggggctcgatatccacacaccattcattgtttacgcaccaacgtggagctcaattcgtttcaacccctctcatttcgctctcgattttcaccattcgctttgaatcgcctccgtcttacccccgtatcttttagggtgtgcagagattgctggcccgcttgccgacgcgaccttaatctctcccccttttgctcccccgcctttgctttgaaatttcggtgctggtcctttcatcgttgcctactctaaacacattatcgatatgtctcatcatgatgttgtcgacgcggagtcgcgtaatcggctaccgactctctttgaagttctcagccgccgaactctcgccccggtcgacctcttttcgttctacatttacatgcgcgatcagcagcgttccgtagactatctagacttttggtgagtgtaagctcgcgttggatgaccgtatctgaagttaacgcgacccataggcttgatgtatcacaacacatgctactgtgccgacactatgtccgtgaacttcgccgttccgtcctcgtcgcgacacccgatctggaaagagaaccttctgccatgctagacaatctggagaacctaggtgatattccgctgacagaagctgggccttctcgtctaagacacggattccaagaaaacgaaaagggcagagatgccgaccaacgcctgtctgcttttcttcgctccgaaggccacaccacatcaccctcccgaaacagtccaagatcttccggcgaatcagcgcaccaagcctcttcctatgacggtggccgtgacaccccggattcccggcttgacgactcctcccccgggcacacagtggcccgcaatgacattcgcgccagcgctgagaaaatcttgtacacatatctgcttcccggttccgagcgagagattatgctgccagaatccatggtttccacgattatcaacctggttgaggatgacggccgagatgaccccgaagtgtttgaccctgccaaggactatgtgttccaggccatggagcgtgatgcattcccagggttcttgcaagcaaaggctcttgggaacatggttcctttgagtaccatcttgcgcctcgcttttgctctgattagcttcggcggaggattctggggtgccttctacgttgttctgcggaataagcctcggcatattcgttgctgggtatgttgatgatcatctctaagcactaatgaatctgtctgctaactttatttcaggtcattcttccatttgctgtcgccgcatacttcatcatctcctatcagtacaagatcgaccccatcatggcgttcctgggctacagtgaatacacctttatgaactgggccccaattcgcgagccatatgtccgaaagctgctgaacaagcgcgccgtcgtcactgcgttgatcgcctttttcacagcggcagctttaagcatcttgtttattttcgtccccggtaccatgatgtgagccgtttaccacgtccagtgtccatctaatacaaacttcaaaacaatcaccccgtgaacctcgttcgatcattcgatcattcttacgtctacaattgactcgacttgacctgtccaaggcgttcccgtcgtgtccgagtacagaggttttgcttctatggtgcatattcttgaaaaagactatgtctcggatctgcagcccattttcttcctgggagctatacagaggtgattgtttcctccatccgtcctatcccgcttattagcggtcacgtctacttcctctttgtccatatttactgtctctgctgctttgctgtgattattttctcttctaccaatacccctcaacacttgaaaatgttgtattgtatctatttttcattaatgagcgtcgccattagggccttacgaatgcaatttgctcctttccgggttctatcccaagagatgaaactaaaccataatcaagtcatttcgtatcataaatcctgttggagccgctgccatcttttgtgcgacataaccatgagcaaatgggagcacctccgcacttcaagacttgcgccccagcaccctctttggctgccgactatttcccgcgcgagcaccaggcgcctcatcaatatccatgcgcgagccatgctcaccaccgtcataattgtcaaagtacccatcatcctcatcaatatcgtccgcatccctcttactccctccgaggccagcgccaagccgaccaccgcgccgaccacccctcttcgccatactttgcttcctcttcttagccttctctaatgcctcatcgtgcgcctgggcacgtgcagcacgcttcgcagcatcactcttaacgcgcgcaatctccgcctccagatcggagacaacctcgccgcagcgcgattcccactcgctcaagttggcgatcatcttagggagggactggggtaggacatcgcggagtggggcgacggctgtcacgttcacggatggtgggttggaggctggtgagaggcggcccgctatcaatgaggcgtagatggctcttgttacgagggattcgagctcggattttgtggggctgctgagggcggtcatcagggcgctgtaggtgaggggtttgattgttgttgagagggttaggagtgagagaaggcggagtttgagggtttgttctgtgttcaactcggggaggtttggggttgctggtgcggggtatcggtggttagcttttgttctggtaaatttgagggttcggttctctggggaggtttcatttggatggtttgggacatggtttggtttctgggctttggatgcgtgcaatcttactttgatattcttgccatgtgccccatgcgaagatctctagtagctttagatagcccttaaactcggctggagtgtctggtgaccgtaatgcctggatcgttggcagctcgaggagctctgcgaagacgtaggtttgcgcgtttgaggtggcatttgtgatgagattcgcgataaagcgaggcgaacctgcgctgttggagcgggctaggtggatgaatggttggagagcctctagggctcgtgtgtgggtttgatccattgtgatatggttaaccgaggtgtaggttcaatgagggtatttggggatattggagagtaaccaagaaagaggactgcaatatgggtgggatatacgtggtagctgagttcaagatgggaagcatcaaatgtagtcggagatgcttgtttgcattgagtgcaaacacgtcttatctgattcctctacaactctacggagtatagagccttggagggctgttgctttttgtttttatttttcgtatattcattagttcctacttctattctgttattgcttattctatctcgtatctattatataattgaatgctagcgtggtaatctcagtgcagggcattctgcaagtatagcaaagcgacaatcagacgcagtgtaaccaggttcatctctgtagacatttgaaacaaccacttattttcgtattgcttagtctgtttcagccttccaataacccacgaaatttgatattaattccctcggggatcacttttaatctaattgaaaacccgaccatctatatgtaatcagctgcccacgcggacattccatagcgtggcagagtcggtccacatcaccgaggtcctattcccgagcaaatccactttcttttcctctctccccttgcgcctctggctgattttcaataaaatccgatcgacgtggccttctaggcagactatttctttttaacttctgcagttctctttgtctgctcaacaagggaatgatctgttagtcttgcgccatccgagaccttccgtccctcagcacgttatcaccctccgccatcgcgtcggaggtaatttggtagacaccctccatatgctatagtcgtcgtttctcgccgtgttcgcctcgcgcttcaccgtcgagcttcaccgtcgagatgttatctacaaatccgcacgccggcggggccggtcgacccgcactggccactacaactctcaagatcgacggaatgacttgcggagcttgcacatcagccgtagagggcgcgtttcaaggggtagacggtgcgcacgatgtgtctgtcagtctcatcatgggcagggccactgtacaacatgatccgtcagtgttaccacctgcgaaggtcgcagagatgattgaggaccgcgggttcgatgcgacagtactttcgaccgaggaacaaaggaaccccgactctacttcttcttctccagctatgagactatcggtgaccaccctagcgattgaggggatgacatgcggggcatgtacgtctgctgtggaaagcgggttgaacgatgtcagcggtgtgaactccgtagacgtatcactactttccgagcgcgcagtcgtggaacatgatgcaggcatcatcaccccggagcagatcgcagagctcattgaagatcgaggttttggagcgcgagtgctggatactgctctagtgggctccaaggagccacctgcaccggctggctcggaagagaaatctggacttctagtcaccacgatcgcaatcggcggtatgacatgcggcgcttgcacatctagcgtacagggtgccttgggcagtgtggatggggtaatccagttcaacatcagtcttctggctgaacgagcggttgtcgtgcacgacccaaccatactccctgccagcaaaattccagagcttgttgaagatgctggatttgatgcgtcaatcgtttcatcagaggcgcaggcatcaatttccaaaaagacacagcagataaatttgagcttgcatgggctgcgggacggcgtttctgccactgccttggaggacaatattttacagcattccggtgttcattcagcatcaataaaaatggctacctctcgtatggccatttccttcgacccatccacaatcggaatccggtctattgtggaaataattgaggctgctggttacaacgccttgattgtcgactcagatgataccaacgcacagctacagtcattgtccaaaacaaaggaaatccaagaatggagaagatccttcatcatcgccgcatcttttgcggttcccgtgttccttatcagcatgattcttccgatgtatttgcccggaattgactttggccgctttgcactcgtcccgggcctatatctcggagatgtagtctgtcttgctcttaccattccggtgcaattcggcattggcagacgattctatgtcaccagcttcaagtccctcaagcatcggtccccaaccatggacgttctcgtaatgctgggcacgtccgctgccttcttttacagctgtttcaccatgatcatgtctctttgcagcgcggaccacggtcgtcctagcaccgtgttcgacaccagtacgatgcttatcaccttcattactttgggacggtggctagagaaccgagccaagggccaaacttccgctgctctttccaggctcatgtgtctgaccccgtctatgactactatctacgaagatcccattgcggcagagaaactggctgagcgctggacctccaaacctgtacatggcgcgcctgagcaacccacgttgggtgatgatatgacggtgaatcaaaagtgcattcccaccgagctgattcaagtcggtgatatcgttatcctccatccaggagataaggtgtctgcggacggcgtgatcatccggggcgaaagctatgttgatgaaagtatgatcagtggagaggcactacctatccacaagaagaaaggcagtcaggtcattgctggaaccgtgaacggcacaaactcaattgatttcaaagtcattcgagccggcaaggatacccaattgagccagattgtaaagttggtacaggatgcgcagacgagccgtgctccgattcagcgcatggctgatatcgttgctggttactttgttcccaccatcatcggtcttggtttgataacattctttggttggatgttcctcagtcatgtattagctcatccccctacaatatttgaaatggcaggcagtggtggccgagtcatggtctgcttgaagctgtgcatttcggtcattgtctttgcgtgtccctgtgctttaggtctgagcaccccgaccgcagtcatggttggaaccggcgtcggcgcggaacatggtatactcgtcaagggaggtgccgtgctagaagctgccacaaaagttactcatgttgtctttgataagacgggcaccctgactacaggtcggatgagcgtggctcacacccgaattgaacctcaatgggcgatgaatgactggcgccgtcagctgtggtggcttgttgtcggtctcgcagagacaggaagtgaacatccgatcggccgtgcgatcgtttctgcggccataaccgaatcaggccacgccggagaagatgggttgccagggagcacgggcgacgttgacaactatgttggtaagggtgtctccgccgtcgtcgaacctacatctagtggccagcgtatccggcaccatgtcctccttggtaacgccagatttctccggtcccaagatgtccctgtacccgctgacgcagatcccgactctgcggaacctgtcgaagacccggaagctgacatccccaagccgggtgtcaccggggccggcactacacgcatccacgttgcaattgacaaccgctatgccggaaccatctccctccgggatacagtgaaagagacagccgtggcagcagtagcggccctgcatcgcatgggcatcacaacctccatggtaacaggcgacacgctctcaacagcgatctcaatcgccacagcagtcggcatcccaaccgccacaatacatgcctccgtctccccatccgagaaacgctcaatcgtctccgccctccaagaaaaaggcgagcgcgttgccatggtgggcgacggcatcaacgactcccccgcattggccacagcatccgtcggaatcgccctcgcatccggcacagacgtggccgtcgaggctgctgatattgtcctcatgcgcccggacgatctactctctgtaccagccagtctctccctctcgcgctcggtcttcagacgcatcaagttgaacttaatatgggcttgcatgtacaatgtcatcggccttccattcgccatgggccttttcctgcccttcacaggcttcatgctaccccccatggccgccggtggtgccatggctctttccagtgtgtctgtcgttgttagtagtctgctgttgaaattctggactcgcccatcttggatggaggttgagcgtcttgagaaggaggtccagtccggtgcaatctctgcagctggtgtggcgcctcgtaaggggagctggtggccttctactactattttctctaatagcccgcgctctctacgtcgtcgtgttgggaacgttttctcttcgctttggtctctcgttactggcaaaggacccatgccggctgaccggggtgatgatggttatgttccgctgcagacagttgagtcgcctgtttaattttgccttgtcgaattccccatataaagacttgtcctgtataacggcttacttttgtttgatgcctcatgtatttcgggcctagttttggcgttttgtttttgtttttcctcatttgatacctcctccgttaaggtcatttctgcatttgttccaagatcctcaagatgtaaaaagcccaaagacaaaagtaagggataggtacatcttgcttgtttgcctgttgtttaacgaaaagtaggttctagtatactccgtacgatctgtctcttccaatatcctattgttcgcgtatccagtggtaaggaatataagacatacgcgcacttggcactcctttcaagttataggatggagaaagaggctccattcaatacctgtagagctagctaaaatatgggtaactgtaacgtattgtcaccccaatgaaaaatctcgtcctcgagatctggcttgggtacatagtctcttactccagctatgtgccctgcttgggtacataactagccgcgtagtgccataggagctcggtgaatgaccacatttagggtgagaaaatgcaaagtgctagaaattgcgggggagaaaatagagtcgatgtatggtcgatctttccccacaaaaagatttctccacaacatagggtgcgacttttgacacactgtccaccatcgtcatcggattgtggctctactaggcacgacagatatcaatgatgcaagcgggcctattgaagaagacgggtgatttgtatctgatttctacctgttccactatcttcttacgccccagtttccacgtcgtgagtgttttactattttgcttgctatatgctatttactaaccacatgcgcttaccagcaccaagccaaattcggttgacttgtgaggatcccgcaatcctcgttcaaaaatacgggaaatacctccacagcgattcgacaaaaacatatcgcgtcgtccttgactctcagagactctcagaagtctttggcccttgggaatttgcgtgttgtctcccgagatgatctcctggaacgatatctaaatactatacgcgaacaagcaatcgaagctgagcgcctgaatgaatacttagtgttgttgatatttggccatggctccttggatcatcatgtttctgtaggaaatcatttcctcgaaatgaaagacttgcaacgcattctccaaggaaagtcactggtcaccatctttcctgttactcgggaggttgacttgtcaagccagattacagaaatcaacagatgaatgtgaccggtattacagcagcaggtgaagacacaaagtcttcatcatcgcccttgagtagaagtattgggcgtgtaagcggcagtctggagtcgttcaatgcctagtcgagatgcaagccgacgaagcccaaatgaacactcaaaaccccattgaaatgagggaaacaatgtaccatccgatgtaaatacagctagcagattctgtgtattcattctaattttaattctaatcaactccgtacttaagcttcatctacatctttagactaaacctatttgggactgtctgcctaaggcaacaggttgaccgcattggagtgcaaacagtgcaaacaagtgggcgggatgactccgaggcttttttgtgctcttctttgataacaagatcaccgcgtttcttgtgtgctatttctggagacggtatctgaaaatcccttctgaaatctctcagtttactttcgccaaccttcggtttaacgggttgttgacacatttaacgaaaaactgccctgccgctcttccaccggctattcacgaaaaatagttcttgcgattctctagattgatagagcactcgttgctcacacgcctacaacaatggcccccaaacagaaatctgggcaaaagccaaagcccaatgcggcggaggaagtggaagagaccttccaagctgtggtaggtctagcagttggcaaatgcttgcgtgacttctctatgtgttatatatttactaacctgtgctttgcttaggtgttcgcagataccttcgagacgagattcgagcccttcacccgtgacaagcctcgtgtatgttctacagcaaaccatctatgcccaagacttcgaattaacgaaccaaattattagtgccttttgccactcgcaaataccccgattatcgaatacaccctcgaatttctggccaatgcgggcgtggaggaggtcttcctctacggaggagcgcactcggatcagctggagaaatacatcaagtaggcttgccctaggactctccggtacggatggcagagctaacttatattgccagtgcatcgaaatggagggccctgtcttctccattcaagcaattgacattcctcaagtcgacttctacctctgttggtgacgttatgcgcgacctggatggaaaacacctcatcactggagacttcattgtcgtgagcggcgatgtgatcagcaacctgcccatcgaaggcgcattggctcagcaccgggcgcgtcgagcacttgacaagaatgcgatcatgaccatggttctaagggaggctggcctacagcacaggaccaagtccacctcaatttcgccaatttttgtcattgaccccactaaggaccgctgtctccactacgaggaaatcgaccgccatgcagacgaggagcattcctctcgcttgaacattgacgccgaaattatcctcaaacaccccgaattggacatccgccaagacttgatcgactgcagcatcgatatctgcaccccggacgtactgagcttatggtcggatagtttcgattaccaatccccccggaaacactacctgtatggtgttttgaaggactatgagctgaacggcaagactctgcacacatacattgtcaaggaccactacgctgcgcgcgtgcgcaacctgaaggcctacgacgcgattagcaaggatgttctctcgcgctggacatatcccttgtgcccggatacgaacctactccctggtcacacgttcacccttcgtaaaggcagcatgtaccaagaaacaggggtgaccctggcacgctcttgcgtcattgggcgccgcacagttatcggacaaggcactagtattggggaccgggcagaagtccacaactccgtactcggtcgaaactgtaaaattggccgcaatgttaagctggatggtgcctatatttgggacgatgtcgtgatcggcgataacacagacgtccgtggggcgattatcgctgatggcgtggttctcggtaagaattgtgccgttgcagcgggatcgcttctgtcctatggtgtcaaaatcgcagataacatctgggtggagagtgggaagcgtatcacgaaaactcgaaacgacggcagtgtgggcaagaacgatcccgcagtcgttggcgaaggaggcgagggctatgagtttattcacggcgaggaagaggaagatgaggacgacgacgtgagcgtagcctcatcgggacttggtatgtttttttctagtgtgcttcttcgggtccgcattactaatttatgctatccacagtgtaccgcatgcccaatctctcactttcttccgcctccatttcaacactatcatccgaggtctcaaatacctcctgggcacgatctgagcggagcagtttctccgccgacgaagattccgacaatttccaccacgatgcatcagtcagcttgttcgacagtctacgcgaaggcgtggcagcagacgtggtacagcttgagctggtcactctgcgtatgagcgccaacgcctcggacaaccaggtccgtcgcgctatcgtaacatcgtttatgaagcacatccagcagctcatggagggcggcaagggtgccggtccggcagtcaatgaggtttttacggcatacaaggaggttattgagcgcactctattcgatcgcagcaagggacaaaagaaggaccaggttgatctactgctcgcgctccagcaggatcttattcatcgtaataagggtgatatggtccttctctttactgccaagtctctatatgaacttgaccttatcgaggaggaggcttacggccagtggtggaatgatgagcggtccagtaactccgaagagatgcggactatccgtaaccagacccagcaatttgttgactggcttgccgaggcagaggaggagagtagcgaggaagaatccgaggaagagagtgatgatgagtagataccacatggttttattaaaattccaatatgacattccaaaattccttttacatatgtaattcaaaccctaggatatttttcattagagtcaaatatatcatcttctttgacaggctaccatgagtctttatcacgaaagcggagcctacaataaggctgacaagtggaatgattcatatctgagtcaatgggcgcctgaaagaggcggatatttagacatcagctgaccaaccatggaatctttatttacgaacttctacgaacgtctgattttgtttcagactcaataaaattgtagacattcaaatatcacgaaaatcgtaattccttcgaataccttcgagtaccggttcgagccgccttcgggggcaacagcccggagatcttacgcttccccactcccctctacccgtgcccgtcacaggttttacccagtggcgtctggcccgatctctcacttataacatcccccccccccccccctgtcggcacttttgccgctaccttcaccacgcctcccactacacgaaagagaaaggcggctgaggcgattgcggacgaggcactgccaaaagccgcccacggcttccggaaactcaatacatccgacaggttctcccaccaaagcgagtcaacagcgaccacaacagaaaccacagaaaaagaacgtctcggaaattccgacctaaagaacaagccccctgcgacacccactaccgccagcatggactctgacgatgatttcatgagcgacgtctccagccaggatgatttcttgggtacccagggctctgacgatgagagcttgggtgaaggtacatgcctgatcttgcgttgtttatgttttgtgcgactgtgtctcgagtatagtgactaacagatgtgccctggggagcagacttcgatgatctcgacgccggattctcggacgataaagacctcattaaacataaaaagaagccatacgaagtcgagttcaaggttcttgctcctgcagatatcgatcacgaacagcttggccaggtcaacgaggtttgcgccattctcggactgccgcctgagtcggcggcgattttgttacggttcggccggtggaacaaagaaaagttgatcgagtcttatatggagcatccggagcagacgctggaggaggctggtcttggatcgaactttgaggggaccgcgaagaccgagtgcatcccgggcttcatgtgtgatatctgctgcgaggacggtgatgacctcgagacgtatgccatgcgttgtggtcaccgatattgtgtcggctgctatcggcactacctggcgcagaaaatcaaggaagaaggagaggctagtcgaatccagtgtccaggcgaccgctgtaatcgcatcgtggactctaagtcgctggatctgctcgtgacaaaagagcttcaaggaaggtgcgtgtttatgcaggcaattctagacggaagcaagagttcgctaacacatctctcactacagataccgtgaacttctaactcgaacatacgttgacgacaatgagaacctaaaatggtgtcccgcgccaaactgccaatacgccattgactgtggggtaaagcaacgtgatctccgtcgcatagttcccacagtgcgatgtttctgtaagaatgagttctgcttcggctgttccctcagcgaccaccagcccgctccatgcaccctggtcaagatgtggctacagaaatgtgaagatgactccgagacggccaactggatctcggcaaacaccaaggagtgtaccaaatgtaactcgacgatcgagaagaacggtggctgtaaccacatgacgtgccgcaagtgcaagtacgagttctgctggatgtgtatgggtctgtggtccgagcatggcacgagctggtataactgcaaccgctacgaagaaaagtcaggcgcggatgctcgcagtgctcaagccaaatcacgttcctccctggagcgctatctgcattactataatcgctatgcgaaccatgaacagtctgccaagctcgacaaggacttgtacctgaagaccgagaagaaaatgactagccttcagtcacagtctggtctgtcctggattgaggtgcagttcctggacaccgcgtcgcaggccctgcagcagtgtcgccagaccttgaagtggacctacgcctttgcattttaccttgcgcgcaacaatctgaccgagatatttgaggataaccagaaggatttggaaatggccgttgagagtctcagtgagatgttcgagaaaccagttgccgagttggcaggactcaaggtcgatatcctggataagactacttactgcaacaaccgccgggtgattctattgagtgtcactgctgaaaacttgaagaatggtaaaggaatcttagatatcatctgagtacattgctaacacctgttgctaggagagtggacatttaacattgattggtaattgacaaaccatcttcagctttctctcgccggagactccgggcgagatcttgacgacgtgaacgacatctatttttttacaagttccagcataccttttcctttctccatcatccttgaccattaaaccgttgaaatcatcgcccttgcactgtttcgcaacagcaacggccagatctatccatctccaaggctatcataggcattttttttgtcccgcttcctcgaattggcttgaatagcctgcatgtatcctcatttgatgggggctttttttgggagtgtttttcatcagatttcagcttctctttcctcattgttttgagttcaggcgcagcggtcttttacagaaatgattattctcaggtattatagcagggtgaaattcccccattcaacgcaccttccctttgaccttactaagcgtagtgactgcccacatacgctcctacacaatataaagtgactctatcagtctctaagacagcccagactaatatacaccgcgtccgacctatcccatgacttgaagtgcaaggttttcccgtgagaaacagggggccgtcagcaggaaccaagccaatatagcagaccagatgagtttagttcgcggcttgtaggtccaccgggcctcggcatgccccagtcacaggtcgcgtgttctgctttccctttgtctgccaagttcgttgaaacgagagccaaagttaataatgcaatatgacatataatatcaaccaagcacacccgagtatgtatgtataaagggggtgggttatcgggggttccaatcgaaagaaaatccttctcgaagaccaggaagaagccaaagctccacccaacatgagttaggcgaaatgtggtcaagggcgaagacgggtttgtttagtagccatcttatctgattgattaaatcaggtacctgcggcgtacctgtaccgttggcgctacactgcgaaggtactggtatggtactttacataaaaatttaaggtgctggcaccaggatctgccccctaaactccgtcatcggaagtttcggagattttttactcttccatttatcggtacttacttgtacggggtttgacgctatacaacataggcctttattcttgcccggagctgtacggaatacgagttatgtagttcggccttttcttgtggtcgagttagtcccgaggcatggacgcatggagcagctggaggcccccggagtctggccgccgattctgaataagccatgcatacattctctagggctacggattccctctaagggattgaagtaaggagaataagtaatatagaatgagaataggtagcaaataggctctagcagtcaacagaacagcaataataagggtttttagagtatagaatacctaataattctaataatcaagctgggtggataattttcctagcgccgtttcctggtttttgtgtccaaaacacctaaatttccaattatttccagctattccgttgaaaggaaaaaaaaaaagttcttcttacatttctttgttcatttattctcccatttggttggctttttgttcttgtcgtctcgtgttggcattgtgctgttccttcctcgggatctctaacctaatccctgtttatctcatcttcacttttccattcctccgccctccgccgcagtcaactaccctcccttcctctctgtacgaactcttcatctgctacagctgcgccttgagctagcggaagctccatggcggcttccgatcaaatccccgggcaggaattcgagtatgtcgctcttagatcggttttttttccccaggcaatcgggcatcgggatcgcgggaatgaacgaacacagggacaaaatcatcttattttcgagtgatatgatctgctctggctattgctcgattgtccctgttgagcatcctgcttttttgtttgccctgttgtcgctctggaattcaattgtgtggcctaagctaatgcgatacactctgttctagctatgaagcccttcctcccaactatggcctcagccggaatatgctcgctggtgctttcgccgggatagcagtatgttcacatggctgtcaacggtgtttgaggattttggctgatcggattaaaggaacactcggtcatgtaccctgttgacttgctcaaggtaagcttaatttttggttgaaggtgttaagacttggaaaaggactgagcgctgacttgcaaacatcgctagactcgcatgcaaatcctgacaccttccgctggcggtctctacacgggattgaccaacgcggtctctacaatctatcgagttgagggctggcggacactatggaagggagtctcgagtgtgattgtcggcgcaggtgtgtatatcgcgcgaagtcccgggttaaagattcaatttctgattcgcgatgataggtcccgcacacgctgtctacttcggtacatatgagattgtgaaggaaatggctggtggcaatgtcgacgatggacatcatcccttggctgccggtaagattttcggaactgttgaattgatatacttgtgcaacaactgacatgatatcgtgcagctatgagtggttcggccgctaccattgccagcgatgcgctgatgaacccatttgatggtaagtgacccatgtggcaataaaccatgcccagctaactcctctccagttatgaagcaacgtatgcaggttcacggctcagttcacaagagcctggcgcaatgcgccaagaccctctaccgcaccgaaggtctccaggccttctacgtctcctaccccaccacactttgcatgaccgtgcccttcacggccactcaattcgttgcctacgagtcgatctcgaaggtcatgaaccccaagaatgagtacgacccattcacccactgcattgcaggtggtctggccggtgccttcgcggctggtcttaccactccccttgatgtcgtaaagacgctccttcagacccgtggcctcgccgagagcgccgaggtgcggtctgcaaagggtctgttcaacgccgctgccatcatcaagcgccggtttggttggtctggcttcctgcgtggtatgggccctcggattatatcaactatgccgagcactgcaatttgctggtacgttccattccgagactcggttctttaatatctgatctttactgactgcttctccaggacatcttatgagatggctaaggcatacttcaagaagcacctcgactaaatgaacgacttgatcctctcgcatgtggctcgccatgggtcccatcccatggacttgctacttgttcgatataccacgtttgtgtgtgcatcatataatcttactttggtctcttcgggcgacatggggtctgttcttttacaatatgttatggattggggagattgggcggagcccagcaaccctcattgtggcgcatcccgagccagcatcgctcggggtttgatcttgcatgtttagggcttttcatgaaaagcgtttcggcaatgtatagttttgggggaaacgggacacggccactttcgacttcggagaacaaatctggtgcttttctttcttattcctggatacttcgatgaatctcttccattcgatgtgtcctatactgtgaccggcgttggaaaaactctggttctttatttttgtttcctgagagggctgggttctcttgtggcatcactataacttatgtttttttagtatcttgcatgtacccatagacgttaggaattagagatgatatcttttactcaattgatttgtataaaaatgcgacgatgtagctcactggacgcatgcagttaactccgaaatcgacgacgtcacgcgaaaaatcctccccctccacctacgggagatcatcgctttcaccaactccgccaacttgtccgtgaaatggatacaggcgggcctgtatattccaaatgatgcgcccacggcctgcggattccttgcagaagacgtacgacgagtgctatctcgcgtgctccaccgcggtgtactttgagggccaggtaagttcactagtccgactgccgctccccgatgctcactgtatcagaacaacgaagacgaagcattacggtcctggagaaccgccctcgagactgtctaccatcacaatgcccgtcgagtaccgccgaactataccccgaaatccgaaaccgagaaagccctgcaggactccatccgggcgctggaggtgcaatgccgggaacgagtcgatctactgggtgctctacaagccagcaggagagaatctgcagatggtagtaaagagaatggtccccatgtgaagggcaagttagctatcatgccgccgccatcgacttccaacacccctggctggattggagatggaacaatccctgctgtgggatacaccgacctttccaaaccagccgccattcccggtcgccctgtgctgccgaggaaaccaagccatgagccaccaccagcttacgacgatgctggtccagcgaccctctcggcagctggcacgcctgcactgcgcgtgaactcgaactcttcgggcaaatcgaagtcgcgtggctccagtcccgagcaccggaaacccatgttgacaacactgcgtagcagcgacggcaagaagcacagtaagaaagtcaaggtcacatcaaagaagaaggacttgaggcctgctgcttccacagctgcaggcctagcatggggtagcatctatcgctctacatcgggtaagaagcctgtgagtgatgcggctctagtctcatcccgacaaagcgccgcccacgatcctagtttccgccgagagttagacccgaaatctagttcgggagacgagcctctgcagccgagaattcgcctctcccgagaccatctatccgcggaccacatccctgctacccattggcgcgagcctcctagttcatcatctccaaggagatcgtctcccagactacctcctcaatcgcctagtcagctgccgccgccgcggggtcctcgacctcaacctggcagccctaaaacacaacatcctccgcattcaatgaccatgccaaacccggctgactttgcctttgcaccacctaaaccatccatcaaacccaagcctgtggcgttacgatcttcccgtcaaccgacaagcgatccaatacaagccagcaagtcggagaatccttctcggagtatgacgcctcggcccgaccgtgaagcacattcctcccacgataagccgcggacaaaatctgcacccaggcctcccaaagctagcgaaacatcccgcgcttctccatcatcccctagcggtgatgatctccatcacggtgtcgaccggctggctatctctcaaggacatagccatagtacgatacggcgaaaagccccaccagtcaaacaagaacagacaccactgtcaagcgaccaagagtcttcagagcatcggaacacagcaagcgatgcagaggacgaggatgaggaagacgacagtgaaatcttaaaaatcatggaaaagttgcctaggggcgtggatccccagtcagcaaagcaaatcctgaacgacattgtagtacgcggggatgaagtacactgggaggacatagcaggcttagaaggagccaaaaaggcgctcaaagaagcagtcgtctacccattcctccgtccagacctcttctctggtctccgcgaaccagctcgcggaatgctccttttcgggcccccgggcaccggaaaaaccatgctcgcacgagcagtagccacagaatccaagtcaaccttcttctccatctccgcctcaagtctaacatccaaatggcacggcgaaagcgagaagctcgtgcgcgccctcttcgggctcgccaaagcccttgctccatccatcatcttcgtcgacgagatcgactccctcctatcagcccgatcatctggctcagaacacgaggcctcccgtcgctctaagaccgaatttctggttcagtggtccgacctccagcgcgcagctgcaggccgcgaacaaacaagccgcgagaagaaggaaggcgatgctagccgtgttctcgtcttagccgctaccaatatgccctgggacattgacgaggctgcacgtcgccgcttcgtccgtcgtcagtatatccccttgcccgaacatcatgtccgcgagcagcagctacgcaggcttatcagtcaccagcaccacgagctgagcgacgcggatatccaggtcctggtacaggtgacagaaggtatgtttctttcccgtgtatccttttttttttcccatgctctagttcgtcttgctaattgacattaccaggcttctccggctcagatataacagctctcgccaaagatgcagccatgggccccctacgtaatctgggtgaggccctcttacacacacctatggaccagatccgccctatcaaattcgaagacttcgaggcaagtctgtattctattcggcctagtgtgtcccacgacggactccgaaaatatgaagattgggcaaaagaatttggcgagcgaggtggatagagtagatttggatttacctcatcttgagcttttttggttctgctctgtctctattttacacctccttgtctgtggggtccttgtatcttagatagaattataaaaattcaatagcgattcttctttcttcttctgttagcttgaacctatattcaaacagccaaatgtgtcaaatttaaatttcagagatatatattttggaaccgacctgacccatcgactgatagtattacactataaaccaaagctcggggcatcagcaggtggtttcattgtacatttagatatgaattaagtacaacctgtacagggaatatatagatcaactcaacaacacccggatctctcctgttgttcgagggaacaacgatctcaaactccacttttcaccctcgccttcttcgtcctccttctcactggcttctgtcttgccatcggatttaccactccggccgctgacactagccccggttcccatgcccacatccactgttcctcgcgcctcgtcggcggcaataatcatgccttcgacgaactcgaaatcacgacagaatgcttcgactgcatcctcggtgacgctctggataagggaaagactttgtacgcgcttcagattatcggttgcgtccatgagcgcagatgggaggaagtcgtcgagttgttggctcgatgtaatcagggactctggttggaaggctgggagattggctaaatcggctagctggggtttctgctggtctggcttttcggtcttgtcttcggcggtgtctgagaaaggctctagggcctctaagagcgttttcagaccagaggcctcgaggaggaattggtgttgggtatcgagaagatcgttgcgtagggttgataaggcggcagaaatgggaggggcgtgcgtggagctggcgaaggggaagggtgacacagctgcgcgggctgcaaggagtatgtttgtgcggtaaatggactgcgctgtggtggtttggagttcatcggatgaggaccgggctagtgttaggaatggatcgaaggcggcccggaggacagaagtgaacgggttctcgttgttcgcgtctggagataaatcttctggtccgacggacgattcatatgtcttcatcagtacttccaggccttccaatgcttctagcaagaactgtggaggcgacaggtcgtctgatggagtcagggcaatgtgatcgcccgctaaggcgctgatctggtctcgcatcaaagtctcaaagtggccaagagtgaacttttctaagctctgaatcagatccaccaagtgcgattgttcgcccactagtctggtgaaagttgtgcggtagaaggacagcaagttcaccactttgtagcaagtaacagggtcgtcatggctctgaatgacaagctctattctctgccgcaatgatcgagacactccattaagatcgcggttgaccaagtcactaagtgccttttggccatcaaaggcaaccgcctggccctcatcgatgcgcgaccagggctcgctactgaggccgacttcaatcccgcgagcgagttcgtccccgtcatcaacaaacaacgactcgagagcctctcgctctgagacagttgtggaatgcacccacgcaagcatgtcaccaatgtaccgaagtgggtcatgcgctgagaactcaatcggtttgacagtgtgatcaccggcgccaggcccattggccccggaaacagcatcagtcagtgcatagtggaaagcatcggacagcacatagtcccgcgcctccgcaaagaaatccagacagctgtggaatagactcgggcgttctgccagcactcgtagagcgcgacggatcgtactgcttatgcgagggtcctctagattcaaggacctgaattctttttggatccatcggtagagcttttgatatgctgagttgaggttccgggtgctcagttccatcacctccattcccagtcgctggttctcaccgccgagcaagacttcgcaatcgtgatgcacttgcttgacacgagctagcacgtcaaagaaccgttcgtcaacgggctcctcggccgatgtcaagactagtaaatcctcttccggaactaagaaatgcttcgaaaaggcttccaacagctgttgcttggtctcggtctctttcttctgtgtcatcagggtgctggcctcctcgagtaccggcgtggtatcctgcttcgcgaggttgattcgtttgcgcatatcgtcgcatgtctggttaagtgttgagaccaccgttccgattcgtctcaattgctgttattgccatttaggaattagacttctggaccccaatctctaaaagagcaataggagtctcacctctgccacttttccaaagtccttgacaatctccgcgttgcaatcgacaacttctttttgcacatctagtcgtagttgccgacgtgtttctgcagtattatgaatgcccctcaagctcaaagtctcgagggagtctcgaatgtctgagtccgcatacgacgccgacagaactgttgtcaaccgattggtgagggcgttcgggcgctgcattggcggggataatgaagatgatgcggtcggcgtattagcgccattactggtactaccatttggtgggaagtagctggtcattgttgtttgagcaaaccagcggggagtcggcgaggggaagtagaggacaacctccgacttggcgcatcgaccgccttcgccgcatcttatcgtcaacacattactctacttatttcccctgttgattcgctcaatttattcagttctggaattgcattgctacctgaacgtatggatagcccactcgtttcgccagccaaggcccgccaggctgctattcaagctaaagattgggcgtacgtgaactcctggctcaatcgacaatacgcgcccaacccagttcccaagttcgagcgcaatgaagataccctacgtgtcctcctgaccctagctgcagcaaatgatgctgcagatgaagaagcttctctgcagcattgcgcgcgcgaagaggcggtcgaggcatacaaactacgggaagagttcgaacgcaaagatccccatgaacaagtgaagaatcaactccttgatgaagtggaaagttgtttggatgataaaggaagatgcgatctagaggacctcgccgactctgccgtagctctgggcaataccttaaatccgaccccgggggatctggggcagtcgattgtggagctcacggtggaggagttcgaggcccaggagcaaattgcaaaggtcgacacattgcatcggtatctccagcgagagttggtacggctacagacggagcttgaggaattgaagaccgatgtggcgtatgagacgccttccgatacacaaagcttgacgtcggaatggatacgcggcacgaagacacttgcgatcaaggttggggaataccaagatcgcattgcatcattagaaaaagtccaaccccgggggccaactattgaagagctgttggcggaggaggagaatgttatcaggatgcgggagacggtcaaggctctgcaaggccgcgtgagggcgttccatgatcttcccaaggataccccaggggcacgggcaaagtataaggagctagaacgcgagcttaaacaacttaggcgacaacgagattcaatggtagtataggcggcactaaagccagctttctacgtactttggtcttccttctacaacgtttggtctacataatgaatgaagcttctcccacttgaagatgtattcaaagagcaggccctctggctaataaaaagctgcaaatggtaatgtcaactcatgatgagtcttgggtgcagggctgcccgcaaagtcatggaatgatcatgataatgactactcacctaagggagaccatcttaattgccgccgaggccgagagcacccttagccttatcaccactagaggtagttaggatataaatctttggttccaataacagagtaacttacgctgacccagtggcaccactgcggccgtggttgtcactgacacgctggatcttgccgaagccatcctggtttatacccttgctatcatcagtcttcaagccgcgggtagcgcgctcggtggtgtcagtgacactctccttggacttatcctggttgggatcaggaatgatatccttcttagacttgtcctgatcggggtcagggatgggctccttcttggcctctggaggaagaagtagtcattaacgatgtcttaacatcttgaaagataaagcagtggcacatactggtggtaagatccttgcgaccagtgtcggacatgatgaagattgattgaagtttggtgcttgaaagtaggagtaaactatgtagtttggaagtataagatgttgacgaaggaagaatagccgaaagggcaaaaggggggtttatatagacttgtctggcctcattgtaacctctaaaagaagtgttacatgactttcattgtttgctatcatgatcggcttcatttacaatatacaccagatgcaagctaggcaatgtataactctacagatctatttgggccgggaccccggactaaccacaacctccagttaaaatcgcggctcttccaatgggcgtggttcctaagtcccagctgtatccatagatggtgccctttcacgacatataggctgtggcacacgatagtgctcggtttgctccagcaggctttctagaaatgacatcataaagatggctcgggccgttgccacgatattttaagttatgtacataaatcacgggactattcattatctatcacatgttttgcagtcacatgatacagtggcccacatttccaggggcaaccaattctaattggtcaacgatatttagcagaatgactcaccgcctccgtcacctgcttgggcatcaactgtaagtggtctgtctgtgatcaactcggtcgctctcattctcattttgactcacaccatgtgatctgttcttcttcatgcacgagattgtcaatttgatcgttatcgtcgttatcgcttcgttatcgtgcttttatttgctatcggccaaaccctaacacacccgctacatcggtctcattaaactgccaatgactgcgtcggatccccctgtcccttcaaattgggactttactccagtgcatgacctactgcagtcacccgctgagggctgcattgctagacctggtcgtcacaaagaatcaaccatctcctcgcttggtgaacaacaagccaaggatgatgtccgttacaccactaatggcaggcgtgtggatcctatcacccagcgcagtagcccagagcttggtgacttcggttctctttgggagcttctcaatgaggtcgctactcctgcaagtgtcacaccaactttagggtccgcaaagaccaccaagtccgagctggaatcgctcgatgaatttcttgctagtttagcggaaagacccacgaagagggtctcattcactggcctctttgacattgaaacatccattcccgtttcatacaacacccgtcgcaccatcaatgagccaaatcctcgggtcctcaaagacaccgccactggctacgctttccattcttcttctcggcctgaaacgcacgcgacaggtattcctaccaatctcgagagtccaccattcactatcttaaagcggacctcggttattgagccttctggaacgagtgccaatgtgaaatttggtgtcccacgaacacccccgaagatgattgccagagccatagttggtagtccaagtgatacacccacggcgaaatccaagtctcggtcaggcagaaaaagacccggaaggaacgcccgcaattgcccagtcacttctgaagaaagtgctgggctagaatcggacacaagcgttgtatttgatcattccgtttctgatagatctttggctatctttgtcccatctcaagtgcgtacacctggagcgaagactcaccgttatgataccccaccgtcgtcatttgacgatcatgactggatactgaatgacgatgccatgcgaggacttggttttggaggtactcatgtgcagcctacccgacagctatcagccgcggagcgaagaatcgccctgatgagcagactcctcgtccactttcctgattacgccaaagtcgtgtctcaaatgggactggctttggagtatcgtcccgataatgatattagctcacgtcctattcatgtctttgttgacatgtcaaacgtatgttttagtcccccctctacccaacttttctcaagctaactcacctcagatcatggttggatttcacgattcagtgaaagcctcgcggaacatccctccctcgacccggattcctcgtgcccacatgtccttcgccaacctcgcattgatcatggaacgcggccgtcaggccgccaagagggtcttggtcggctcggaccatcttccctccgtcgatgaagctgagagactcggctacgaagcgtgcatcctcgaacgtgtgcacaaggtgaagtcgatcacaccccgtcgcaccatcaaatcgcagaagtatgcctccagcttccagggtggatctagcggtcctgaaacggtcgccacctctggagagcgatgggttgagcagggtgtggacgaaattctacacctgaagatcctggagagcattttagatacggtccacccggctacgattgttttggccacgggggatgcggcagtggccgagttctccggcggtttcatgaagatggttgagcgcgggcttcagcgcggctggaatgttgagcttgtcagcttttcccagggcactagcaacgcgtatcggaagaaggacttccgcattcggtggggagaccagttcaagctggttgagctagaccggtacctggaggaactgtttgagtgaatggcgaagcctgactccgttgttaaacggagatttactttgctatttcaattttaaatgcaatcacgacacctttgttagtaatgactcaaattccttgaatctgtgactcgagtcgtttaatgtagctcatagtcgtatactccggattgagtcaactccccgccaaaccgccagacgtcattgggcggaaaacacccgcccgcacttgttgcctcatgcacgctcgtctacctaaacgactctccgttctggaactatatagtctctgttgatccgtgctactctccagtattgtttgtcttcttctatattgtcgaacttcaggcaaaagaggaacagagaaaaaacccgcaatttctctcgaagaatttggatttgctcctgcacaaccagcagaacgtccttgcaaaaagaaagaaaagaaaaaagatcaaaaaagatcaaaatcggccttacaatcaaaacatatcaaatccaccatgtctcaattcacagagcaagagttcttcggcggagccattcgaggcgtcgtgccacaaggctggattgattcgaggtcagtatacaactctccaatgcatcaagttcccattttatcactccaatccattcccaataccatcccagaacatcccaatcaaaaagaaccccgaaactaacacccaatccagcactctccgcgaggtccccgaccaccaagagctatggctctcaccaaccactctctccaacctaatcatcgaaatcaaccagcgcgtcccacaagacgaagctctcagcacctttgccacgctcaaccagcaactcaccgccgccccaggcagcggtagcgctgcacccgcaacgacagaaactgtcgaccaagccgccgccctgcaccacctacacgatctctgcgacgaaggcgacaccatgcaggtgatcaagtcgcccacgcgcgtcgacgtccagcttgcttcttcctcgcctaccccttccggtgtccgggcgtatcgcggcattgtgtccttcacgacgccggtgcgcggcggcggtggacgcatccctgcgtcggctgaggggtctgctgctggtgttgcggatgccggaatgttgggcgcgcaggtggatgaggtttctaatggtttgccgcaggtttcgaggttgacgtgccatttcttgattgttagacttgaggcgcaggatacggatttgttggtcttctttaatgtgcctcatgaggagtttgataagactggggatcctaatgggttgtctgttgaggaggttcttgctgaagagactattggggctttgactgggagattgcagatttgtgattggggtctatttgtttaggtcttatggacttggatttagacggcagattgggactgagcttggggagatatggttgtgatagctgggatttgggacagacaagtgccatttgcgctttgagacgagtagataaaaaatgaaacattgacttccaagcttatcttgtatgttaaaggaccaccagtgctttaatctatacataaatcaaaggttgtattgtggtatagtgctatctagtaaagttctatagatctagccatttcatagtcggcgactctcatatatccatcggcattgcagtccattctgttgattcgtcagactcttcagaaacacaccgttcacattggcacacaaaacggaacgattttcgaagatgctcgcgacgcgaagtaatatccgtatattgtgttaggtcgaagtacgagatgcaacattcctcgcccggaaaaatatcgcgggaggcggtgaagaccatgcggcctttatcgtcggctttatggatgatctagtggtgacttagcattacactcacacatttacacctcgggaaagaattccacttacatttggcagacatgaatgattagctatagccgcagtggggtaaacagcagcagcatattgctcccctctatcgaccggaggatttggcagggggaaatggcctgtttcgcgtgggtaaagaccaaatgagtttgcttcttcctgacaaatgagatgaagaacacgatctgcactcatctcatggggaagagcgggattactccggagatacttcttcacaagaacagaccaagaccggacctcgtcatgaggccaagtatcctcagaaccacagagcgactcaataccactccatccatgcttccaatgccttgtcgactcaacgacaccaagcgctgtccgtccatgcaattgacaatgtcgcgcagcaagtagccgaagaatgacccacagcatgccgaaatcatattcactcctttttgaccggatagtgcccgcataccgtttgagccaagcacattcaaatccatgtcgaagactatcagcgtcacgacatgtgctaccgcaccacgtcacatccgggatacaggcattcggacatggactccgggcatggcgaggcgccggccgattacatgcaggattgctgcagatgagattgtcgttggtagcgggttcgtcgacgaccgggatgactgcgtacggggaatcgacgaggagacaggcgcctttggggacgggaccggagacgcggaattggcggcctttgatcgcgtcggtgctttcgattagctgtgggtggatccaatcgggctgcgtctgggtgattcctgttacatgaatccggtccgagggttccgtggtgatatatacgacttgagacatggttgggttgggtactttgggggaatgtctaggtctgttttgggggtttgtttaacgtcggtttcgacggcaaattcttttgcgcgtccattattgcgcaggttttggttcctggcctgtgggtcgtttgattcgcctcccggatgtaagggcaatgaagttatccaagcgactacgagtgattggggtcccacacacgggcatagatttgttgactttattggctgatctgtatttttagcggagtagcttaattgatccactttagatgaggtagtgcgtagatgatagtagcatgttatataactagcttctctgtaaaggccttatcaaatgtcacagcagattgaaagtacggtatggcaacaatgactgaaccaggatacaggttgaaggtacatgtatgtgagatctcaatgcacctacagccacgattcggtaggtgttgaacaccaccttgacatcgacacccttgtaactaagtttaaaaggtagtagctgtataatctagaaatataggtatgtagtatacatttgagttcatcttagcttcacctgataatgactagtcactgaccctgcggagaagggtgagctcgtcgtcagtgctagctaactatatactaaggataaggtaaggatagacatgtatatcagaaacttccaactccccccctacgccctcgcctggctcagcatatctgccgagcactcgtcggctggctgaaactcctgaagctcgatggcattgcccccatccccatcctccaccaccccatatccaacgcggaaaggcagctgataaaaccaaaacaattgaaaaaaaaggcttaggccatcagggatggccataatcaagaagaagaaaaagatttgtgatatgttcaacaggctaattcatccgttgtccatcgtcaaggttggtccacgatgatgattcattgtatgcgcccgctgtggtgttcggctgctgttggttgatgtctgggcggacgagccagccaccagagtagtatgatgtactgaatatggtggtggagggcattggttgtagtacatggcggaggtctttcatatccaggacagagcctccgacctctatcccatgggcactacaaagattttacttttttttcttctcttttcttcaggaagtgtgaaggaagggttcaagctaacttggatgaatggtaaagcttcgtcctttgatgttgattgtgttggcctgtttcacacactgccacctcgttcgacatggtaataaacccgcttgctttgacaatatgtccaacgtgtgtaaagcgatgattattccattgtgatggtgtgtgtgagaggaggagaagagaggaagagggaaagagggaaaggccaataaatagtctacgtagctggatgaagctctaaaagaggagtctcgaatatggtcctaatgttctgggagttctaagctatatgccattgatcgcactacctgccttatactacaatttacttcaaggcatgcaagcccctctctcgcaactcccagcggatatgggcccgccccgagcgcgttcgcagagaatatataggcaacacctgcacaatataggttctttgcgatgtgttgtctctcatatctcgttacttggctctcaaattcgtactttccgcctctttggtgcaccatctcaaatgcgcaaagatcctccaatatacatcctcggccgcatcctttcctacaataggatcaagatgcccatacccctcgactaggaacctgcgatacagtctctcgccgaatcgacgtcgcagcaactcgtagtccttgagcgtagactcaggactgaaaacttggttctccgtacccgagacaaagagaatcggcaacccttgcagtcgctgcaaattctcatctgtcagaagaggacatgaatcattatccatgcaaatcccccgagttcccatgcgaaccacgtgtttcataagcttcgtatgtgtccccgcgaaaaattggtgaacattgtcatgcagactcatatcaaggttctcgtgattccatagtagcccaaaagcaaaagatgtccggtgacacgctgtagatgtgcagatgtcccgcgtgtgtccaacaggatagagacgaaggagcgtatcgagtaatcgttggagaagaacactcttagcactgctgacaatcgggaagtaattcccagccagtaattcgtagaactggatcagcagagtcgttctccccttgagggagttccagtacccaaagacctgattcatgaagactgagttggcagtaacgccgagaagttggctactttggatggttccatccagcaggcccatgcagagagccaccgagccttggcaatgggctaccacatagggcttctgtcgctctttgtcgcgaatatatgctattgcagcagcaacgtcaagacggcagtcgaagactgtgcttttctgcgcaaccgcgggatcacagccccagcgaggggtgagtgcgtagcatcggtgtccacgctgtgtgagatactcaaccatgttgcagcgcaaaaatggcagtgaatacaaattgtgcatcgcgccgatcccagtgactccgggtagaagtaggactggtgcaagattgcagttaggtcctggctcgtctgtcttttgtgcggggagtgggtcatatatatcaagatgtatctgtacgccatcgcttgcggtgacattgcacgaggtagaaggtggttgttttacatcggtgcctttagttgagatctgagggaagcgcatgcggacgaaagggcgaacgaagaacaaactgatgtggtaaataaaagaaaccaaaaaccacaccaaggccaagataagactgatctggaagtcttttgtcgtccgaaatgtccgcatctgcttttggaagtctagcaatgagatatgaagggcccctgctccaatagttgtcccgtccagtcgagtgatattgacattcaccgtagttgtcgcttcccaggtctttctggcggaaaaggctatgtttgtgttgatcagcttgtggcctttcaggcggtactctatgccctctaccgatagcagcttcaggtgatatgatatagctgatgattcggcattctcctctattggcgtgaaaaagtctaccgttccttcgacaatcttgagcgtggctctagataatgcgtaacaagaaatcgtcccggtgcatattccttggtattgtgaatctgtacatgtgagcattctactgccagagtgctctctcgactctcggtttctcacctcggcagatttcgatcgtaagaaacatccgcatcgcgcaagatgagccttttcctaccctctcagaaagcgcaaaacttccgttatccgaccgcatgctgatgtgcccatgcatagtctctgtgaatttccatcctatcgactgcgatgttttctcggtactgtcttgatggtcttggaaatcgcacgatatactaggcttgcagtaggcgtttaaagtctgattttcagtctcaatatcaattgataatccagatctctcggtaatcaaactgacggatcgctcggagagggctgatattgtgccgagtgggttcacgcctatcagaatcagcacatagtaagccataaatttttacttgcaacatacccagggctgtcgggatgatagatgcatcacagcacacgaggcctttgtatacttcaccattagagccactgaaaacctctcctagatgatttgtcacacccccatgccctgttccatcgttgctcatgttggctcctccaaggagatggactgtggtttcctcctggtgacgacctttggctatgtttagcgcagctttgttatggcttttatcgattgttaccgtaaaaataggaaaaccccatccttgagcctgtgcgagcaaaactctcattgaaaaggttctttatccatttgaaatgctcagatcgcccttctcccggtccccggaggtacaatcgatcatccttcaagatcaaagttatctcgttgctgtcatgagacatcaccagataagttgaagtccgctgaagagctccattgtatgcatacggaccgaatagcagagacttgagagaggcaagggtcttcttagcttcttggcgagggttccaaagacaacacagcgcctggctcttcatagtttgcagggtgagcatgatttggattaccgggttgaacatcgcaggaatgcaaccatcttggataacatatccagaaagaggattgtccagaggatcaacgactcggttatcaataacagcagtgactgttgttccagggggagcacgcgaggattcaccggcgatcccgttgatattagcatatccgttgtaaccttgaatctgtaaatcaaatgtgctcggactgatattctggggaagtacgtaccaaatatcaaaaagtccccatttccagagagattccttccaacaagcggtgacatatggaggccgtgctgctttgaccgaagcaagacttcagtagttcctagagcgccagccccaagaaaacagaactccttctgtgattgaagtagaaagagtgagttgatatgtccacttccgaagtgaattcgatacttactgctttgacccaaaagagttgttccttgaaatgatccgcaaacaccgacctcccacttccatgccaagcaaagtgtatagtgtagcctcctccgtccatattttctacaaatcgaacttcgcatccgcagaatatctcagctccccaattccaggcatctgcaagatatgttgtcgccaccgagttctttgacccatcgttgagaccagtgcactcatggcctgattgtctgtttgcctgcatagggacacctgcattgttgcagccattgtggaaaaatatagtcaacggtactcgatagaaattattcctctttcctagccatctcaactcttcttggagatgcttgagtttgtttgggcttaaatcatccgggtatgtggaaggctgtagcattgtttcggcgcgtgcgtagtctgcattggttattatgaaatgttctccaccatgcatataaaactcacgttcgtcgagcgcagatggctggtccctgatctctgacggccatggactcatctgcaatgttctcctatccgctttcaggaaaaccccggcattgatcaatgaagatcctccaagtcctatgcaatatagaaaaaggctgtcaggtttccctaatcatcaattctagggagatgttgagtatcacataccatgagcagcaaacgaatgctgtccatcgcctaagaatacttggaaaagccgcgtggggtctccaggcgacagccactttgaaatgaaggagccctttacagaactccccgagatgctcgtgttcttcagacattgagagaacgtttgtggaaatgaaccggcttatgggaatgttagcgatggtatttgcttgacgctctcgatccgtacatcttctttcccagccaagctctagcactgcgacgctcttccctgctcgggccattcgacttgccgctactccagcaccatagccagatcctattaccacgacatcatattccggcctcattgatctgaacggacgactcaggttcgggtacttgtccgtcctgtctgtgaaatttgacattgtctctcgctttgagtggaaaatgaatccttagagacacagaaaacaagaaaccgacatatacgtttttgggatgattaggccgatataagcacataagcactaggattcgaagagtaaggattgacacgtattttgcacgataacgcggacaagtagaaattgtcgcatccgaaataggcatggatgagccctgagctggacaacgcctattggctatatttgtcgagttattcttagtccggggtaatctcgtgttgacaagcaagttagcatgaagcccaattcaaaattcacatgatatgacattatttccaactccaaagaggtaatcctgattgtagatccggacaagtgcttatcgaatacgtgctcactgagtaactagttagcctaggggtgagtagtctgcatcgctagtcctatcacgtgcagccctccacttctacaaggcattaatgtaaacaatgcaaaccagaactaatgacccctccatgcatatgctcggtgacttcaaacaccaaggcaccagctgattccaccttccttagctatcgacctaaaaatatgctaccagacgattcagaatgtggggtactcgaacgcgtacaattgacgccttcgatgataccaaaatctcccaattttgacgtcaaagattcccaattcttcagaaaattcaccaagttaccctcaccggaagaagttcgcttgcaggccaaagctcaacatctcgcagaagtctgtccagataatagaaaaaccttctcgatgactggctttaattaccgaacaccacctgtgatattcgaggatctggggctgtttgtcaaatggggaggcattgtgagaacttccgagggtcagtgcctctatgctctcggccagctccttaaagatgatatcccgattccggagatatacgggtggcgggaggatggcggtgaaactttcctttatatggagtatttacaggggcagactctggagcaagtgtgggataatctgggacctgataaccgcgtttcgatctgttatgagctccggacaatcgtcaaccacattcgccgccttcaacagaagccaggagagtcattcgtgggtacgatgctcttaacggcctctttatttcctaaactgcatccataactctttctccacatttaggtgatattgcacaagatcatctatatgatagagtattcgaagtcgagtcgcccgaagcaggaccgttcaataccgtccgggaattccatgactggttcactttcctacatcgaagaccaatgccagatccatatattgtcccaatcgaaccgttccgtcaggacctgcctgatgacagtgaaattaaatttacgcatagcgatctccaccgaagcaacattttgataacacgctctgaaccctatcgtgttcttgcagtcgtcgactgggaacagtctggctggctacctatatactgggaggccagaaaggcgcagtatactgctgacactcaggaatggtctaaaaaatatttgccaatgattttatgtcagtataccagcacttgggatacgtgggcctactacactgcggccctgggagtttgagatgttgagaaaggcagagtcttattgttctggcttttattgatctcttttctgcacaagataaacggcgtcgaaatatcacccagagacagtgtttgttaaatgtgattggtttttagctcaccaccaggtattaggtctaccgcaagtctctcttcatttttccttcctgcttctgatgtgatgttatttcaacgaccaagcaataagttttagtatcttttttcgtgtcttcgtagatccgccggccgagattgatactatccggaagatggtagcgggccataatgccttcttgaccatgccccctttccggaataccccatggtcgatttcaacgataccgagcccttattatcgctcgcattccctactctctttccacgtggggcagctgagttcgtgacacctcgcttgagagccgtgcgatagagtgacgatatactacaccttaccttatgaaacacgagagcggccgctttgtacagcatctacgattccgctatgtggtattcaataccatgtagcggcggcaggcggccaagagtgcgggtttctatgtcaattggcagatagaccggcctaatatcacgattgaggaactgcaagatatgttcagtgaactaggtagccctatcggagagagtgccacctgggtgcaggctattatgaagtctgatggatggtgcatatactggatgttatttatatttgaatgactatataagactcatgggggaaatgcggaggatgagagggagcgcaaagactgtgctgcctattttggtggttggcctgcttgaacaggaaacgaagcagacatttgccgagatcgggaaacttccgtgctcgaaagaaagaatacagatagctccgatgacactgctgtggagtgggagtaccgttaccaactgcgtgatggaatccggtcaagatactacttgcctccgtgaatactgaggcctgtgacatttctatcgaataggctcgccagcagggcatttttgactatagacatcgcaccttgctattcccgactttactacaatgaagcacatcttcttctcccaatatcatatatacataatatacttagacctgatatcctagaaaaataattgacataggtagacattcatatgttcattaaattgggctcattgacaatcccactgccactgggcatacccaactatttacaagcataaacgggttagatatcaaggatcaataaccacaatatccttctcctcaactggcgccttaacaataggcctcttcggcgctacagccctcggcaccggcttgatctgctcaagaccgccccggcaacggccgcagaagtgacgcttggggtcaacgctcttcgagtgtcgcccgactgtgaacccacagccctggaccttacaagcccatatgtatttgtggttgatctcgtaggtgtgtttggtcgtgacctcaacccggcccccgtagatagggtggccttccagtgcgcggacacatcgggcgccccattgcttgaagctggcgccgtgctgcgccgtgccctttgtccggttttcagtgaccatgatatcgaggaggtggcagtattcgtgtgtcatggtgcagaggatcttgtcctcgctgtccaggactttctcggagagctcaatggtggcataataacgccgtttctcggggtcttccacgccggatgctcctttcaggaacctttctgaacggacggttgcccggccggcggtgtttcggaaattctttgtccagatgattttgatgccgccggtttgctcggtcatgcgagtaatctggtcattggaggcactgtcaaggtgccggaggaactcttcggcaaagccgatcttcttttggttgaattcggctacttgggctcggatctcgcgtttccgcgctgcctcggcctttttctgggccttgatggtggtgggagtacccatgccgggcgacctgtcaattgatatgatagagcgagtgagagaaaggtgaggcttcgctcgtgacggtgtcacaggtggtagctttgtatggcttaggtagggcttcgatggtaattcatcctctgactctgagctgtgagatgtagttagtatgttggccgctgccagactatgagtgcacatgaatgcccacatagaacttacttgcactgttctggctgcgtctgtgttgtagactcattgtcactgttcaggtcaagctcctcgaggtgtttgatgaggtcgctagagttgtgcaggccgaaatgaggtggagagcatgaatcaacatgcttaggtattcctgccctacggataggggatgaagatttggaactggttgcaggattcggtgtgcagtattcaggcgttgagatgactgcctttggtttctcagttgatcggtccgtctctttcaccaacttggtcatttccattgatggttcctcatctgcagtggtgttggattctgcttctgatataggtcgtcttccacgcatgagtctttttcttggcgacctcacaggcgatggaaccgggctaggttcggcttctatgtcggctgtctcggaatccgatgtctcaaaggagctaagctcttcattgtcactgacaatgaacccgtctagtgagtcagagctatcttcttcttcaaagctgaatcctggctcctcttgttcctcttggcggtcaatcacgggctgtgtcgcaacgaaataattcactctgcttcttgtgggagcctgtgtggcaatcggccttgttggcgttaaatctggagtgcgatgtccatctgtggtgtatcctgccacatcgttctctttgtcgtaatcttcagtctctcttcggatggcggggcgtggtctccgctttgctggtaggagtaacgagttcacacgtgcgagccctagtgttctgtgcttttgctgcttttcggtagacttgtgctgtccagattcactttccgatgctgagtcgctgtcggggaatatatcgaatgatccacttgaactctttgcttgccgttgcgatttttgcggcttggtgggcatattgtgtttgactttgttcccaagattgagacatggctctccaggtggtgaactgttgtgagatttccctgtgcgtgggacagtctcattgtatggcgtgtttttgactagaggattggctgtattgacccttgccatgatcgcgatgttgttctgatggcacaatcttcgtggtgttaatcggttaatgatatcctataggtgctaatggcgatgatgatgatttctctaaattagttgaactgtgtttgcgctgaccaggtcagtgccggagaccccggtgtttttcgttgttggtgtcatgtctgttcagctgtcaacgaattcgttggcacggcaacgtatgtacccagccaggccccaactcttggcaaatcgggaaacctcgatcctttcctatttgtcggaggctgaacatggcactgatccgatagtcgctatatcacattcgcataacccattgggactttggtgttgtattgtagacaggcccctgcgcctctgctagagccgcaacagcaaggaaacattgccaacaaacaaaggcgtgttgagcaggtggtgcgttttgctttcatcagtgttcagtcaacagttactacaatcgccgcggtagcctattaaaatgtactctagtctcctacaacaaatgttgcaaagtaggaactacatcgccttcgctatgaatcgatcttcacacttgttcatttcgatacatatgtgacttccggattctccattactatgatgattgtaattcttccatacggatttgaagattcacgcgaataatagaagaactttcgacggatattttcttccagggtacattgagtgtgcttcgctgttcaccaagtccgtccatccagttagatccttgactcagtccgtcttcggagatggcttagccaaacgaaacagaacgtagtacttgtcatgccactcttcgtttgcatcagtacggcctgcgcgtgaaaaccccgagaaatgcctaattctgtcagcttatagtgctctccattcaacaacggataaagcgtacatattcccggtggcctttcatagatgatcttcgacatagttgacatacacggtaggtaaccgtgcttcttcagctttctaattttcatgtcaattgaaagcacgccaggcagagagttctgtagacttacggaaaggcttgacaaaatttatcgcggatctctcggcgcgactcaatttctagcccccagaattctccttccctgagagactccctgggaactttgtcccagaccaaataagtgatatagccctccggaacgatactatcttcgccttgctctctctcttggtaagcaaggaggtcagggacaacattgcatccatatttattgagcactttcaaggtcgtcaactcaacgtgcggttgtggcttagcagcctgcttttgtcgaatttgagggctctgatattgagtgccaatgactggaatttgaaaataaatccgcataaaagctttcttgctaggatttcctttggggggcagagaaacttagcagctgcgtacggaagtccaaggccatcgtcaacgtcttgctgcatcatccattcagaccgttcagagagcgtcttatcgatcacccaggtctggcggggcaggtggagaggcggctcggatggtggatcgagagtgatggccgtgccgtcgaggccgcacaggagctcggcggtttcgggattgtccaagctgacttgataagctttgcaacgatggatgaagacgtatttttggtcaatgaaaggttagtacagctggtgtttgaacgagagtgaaggaaacgacagttgttgatgggaaatgcaaagcgtagacctcctcgagctctggtagactgggtgttagggttttggcacccacaacagcttaataataagcaagcagtccacaatggttattccaatccttcttgtactctctaaggaagtgtcaaataatggctggactaccggtgagattagcctacgttggctacaaaggcactttattccacatacgaatttgatggccacggtagctaccttacgccctaattcgaccgaatctactccgtattccgtatacatcgatattatacctccactgcgaatcgttatacaacactgcattgcttgtacaggagaacatgaatctacgcatggcaaatgagaggagcgttaagaagcgcgctcggtcaactagacagaataccatgcgaggaaggtttaaccattaaaaatggcctgcagctagttgcgcagttagatttacccaataagtagcccggactggaatctacttagtaggtctcattaggcacttagaatagaaaagcccacctcgtaggggaaatatggtacgtatctacaccatctccgagtgtgtagtgcattagttcattaatatggcattatggtactcctaccgtatttgtcgtgtcatccacaacactactccaaacaaggctccaatattctttagggaaagaaaagtttgatggttgttaaccttagaagttgtggttgattatatatcggatgcaaccatgacgaaatatataactacattgacagcaaaaacaccaagacaaagtctatttatatgactgtatatactgatctaatatacgttatgtataatgagatcaagtatggcaaccataactcaaacatacaatggatgaagctgtacttccacatagaatctataatgtagaaagatatgcctcctgtctacattgagaattaataaatctgataacaaggtagccatggttattatagcctatttacatataacatacaaggactaataagcgtcaactaatgatcctagatgggtgaaacccagtcccaaagccaaaaccgccgaccgaacaataaaaccatagaagggagagcggaccaaaaccaagccaactgcagctctatgacgtccaatcataaccagcacgacgagaacccgaagaccagacgtgcccaagtcttcaaaggtctcaggtactatcaagccggcctccttgctacaggtacatgatgttctacacggaatggatgtacttccggagcatgcggatcgcaaacggagaagccacattataccgcatggcttgcaactgaggttgggctcctggacggctggacggacctggatcgacacgggcagatggacgttgaccagccattccatcgctctgccgatagagatcggcggccccttgcatcccagcacatagtggatatgcctgactcgttgcaatctgatcggatatagcctccgattggtgagaggatgtgccagttgttcgcatttgtagattgacatcactggtgaacattcctggctctacttcggctggagatgggtagtaatcggttatttgtttagattattcggtgcgagatggcttcgatagaaggctagtgcaaataatgtggcttggatattaaaaatagaggaaataaatgatttacagagagagagctctccatatgggagatgaccatctggagtcctcgggttgatttgttctgctagccttaaggaatatattgtagaactacactatgaaagagagtatactaaaagtaagagacgaagtaataggtacacgctgtactagcacacattgttgagtgccactctacgtgctcatatcatgcgattgcgagcgaaaacgccgcaacagacacaaatttgaatgttgaatcaaacactgagataagacaatatttgagcaataattggcgcttgatagacatgtctcactatcagggatacagcataaagtgatgttgttgctttttgaaatttttgatctaagtacttctagttgtatatatatcgtgagcgagattgcacaaccatattcgaggactggcggagatagcataaaccatgccataaagccataacaccgtactacaatgtaatacctgctaggggcaaaagtataccctgtagtcatatgttaagttctttatgtgaaaggcgggaatcctgattgcttgtttgaactcccatggcattcgattggctacaatagtacatactaattcaaaactccgtattccgtactccatttcgtgcatagacgttgttgtacaagtcatgtggtgcggcaagcttttcaacagaaattatccagtactgttgtacctgtacggaggactccatatatggacacaactacggcctcaaaaataggggctgtgattggctcctggtcatgacgcagacggcggtggaggataacggcgcagaggggcccgggtcacagccccctaattataaattgaatcagtgctcaaggtgcggtcaactcgactcctatgtataactatgataatcattagaggtgccttataaatcaatggatctactgtagagatcgaaaccctttcacggggagccagtgcgaacattgaatataaaacgccctattcaggggccagagccaaaaataatcatggaagcgcttgtatggttctagaaaggccaatgccatggctcccctatgtactccgtaggtccaagtaaactattttctaattaataggggtacgataaataaccctgaatcatttgcttatatttagccacattgaagcgctgtcgtgctagtgtagtgtacacagtattgaaaggtgacgggtcaatacgccacaatcagtacaataaatgtgcgacactagggcacgcctaccggctaatgatcgctgactaggccctttaagaccgatttcgccgaagattatttttggtgcttattatataggagtgcaatccaatcgctatcggcttcttgagagtgtaattgattatagggtcaataaaggccacggtaagtggatagatagcgaaaacccacaggggaaaacgaagatcagatgtcgaagatcggtgcttatgcagctgatgtgtcgttcctgtacctgcctccactaatatgaaagtgtacaaggtacaagtactcaaagtaatactgcagtctgcgagtatatatgtgctacggcatacccgataagcattggcttgcttgtgcagtggcgttggtattgcgtacaactaacatacggaggatggagtacaatattttatggagtagacttctgggtcgaggcttgaaagaatcattaagaaaaaggaatcggtgatccacttgtgtggacaagatgaaatcccgagtctaacggtggagatcttggaataccagttctaagatacagcggtatgcatagagtctcaggtgtattggtacatctatatacagtacacagctgtgttatattgatgtatctgtgacagactatctagattgcacagaggctaatgcatcgataaccttggaagactaaaaagataaatatagtcaatgacgattgagttttcaaacgttatttagcgagtggtggaagatcaaacaaggctagcaaaggctgtactgccaggttttctcgtggtacaggatccaccgataacatccactatggcctccgtacgggggagtacatgtatgggcttgccagccacagaataaccggcagtggaaagtcaaatgtaatacacatgggactgatcgaccagatttgagacaacttgtattgcggtggcaaatcagcaaacaccacaacataaaaaaaagattcactagttatgaaagcagcaatttgaatagaagatccagattcaacaacagaagatatacaataagcagtctggtagcaaaggtggttcttgtcgcgggggatccatggaacggcagctgaggacacgaaggccacgggtcagagctcaagctgatattaattttatttgagcttcgaatcagattgaagaacatcaggagataataataaacggaatgtaaaatatgcaaattactagttcacttgtatggtccttagttgctactggtcacaaattccagaggcactgactcgccacataagcagatagataagtgtacgtacccgtacctaggtacaatatgtacgcagtacgcagcccgtacattgtggcgaacactgtgagaggcaagtctgaaaatggacgccctctacatagtaggaatggaaattgccggtgcaacgccatccctacataccaagtatagtcaccatagcagagtcgacgaatcaaggccatttttggaacaacaccaggtatctctgaaaatagcttccggccacattatttgttaccggattacatgctggctgggtcgcggtggggcaagtttcaggggccgtcgagactcccttggattccgagtgtccatgggagattgtcattggatggtgagaggggagattggggaaaggtgaaaagtgatcggggaaaaaacaacagcgtaattacagacggacgatatcggtaattcacaaatggtcgatcagcgagagacacagagagagagaaagggaaaggcgtttggtgaatacaaaatacctgggagcgccaataggctgaacttaatgcgccacgtacggtaaacaaaggggggggttgacagtacctgggacaaataggggctaaccatactgggagcaggtatccagtacctgcaactctgacacgtaccctttatagctgtaagatgacggtaaattactctggagacggagccagttcccccccgacccaaaaataacaagcattttctggtcttccctttccaacccccttccattcgctttttgtttccatctttccttctaatttgctatctttcttgttctttctttttgaaggataggagggaggttgctttgctcttcaaacgttcccattgcaccttcctttgcgtgaaactctcacctgccattcgttacggagtctgagactcgttcgacaccttcgcttgggtactcaagataacgcatttctttcctgcgcttgcttcgactttctacccatgctctattagttcgacaacccgaacaaaagaaaataatactttgaatggtctccgaggtgagataggcttgagcttgcatcattattgagctgggcagctaatcccccgcagagctttgagcaataaatcaatcgcgactcgcttgtcatgtcgggctacgcaggcggaggccagtacgacgatggctatgcccacgggcaggcacatggtcaagctcatggggatgctcatggtgactcgtactaccaggacgaacatgcacagggttattatgacaaccaagggtatggcgatggctactacgatcaagggtataaccacccccacatcagaaaatggagtcatgggctgacaagactagtaatggctactacggagcagacggtgttcacgccgacggagctcctggggatcatgcagctcacgcggatgcaggccacggatacgccgacggcggatactacgaggctgggcatatagatccccacgccgcagaaccgtactacgaccagggacaaggggaaccccgaggccgtcgtggtcatgattccgaggaggattccgagaccttcagcgatttcaccatgaggtccgagactgctcgggctgcggacatggactactatggccgtggagacgagcggtacaacagctactcagacagccagtacggcggtgctggtggataccgtcctccttcctctcaagtttcctacggtgccaaccgatcatctggcgcttcaactcctgtctacggaatggattacggcaacgccattcccgccggccagcgctcgcgtgagccttacccggcctggacttcggaggcccagatccctctctcaaaggaggagctcgaggatatcttcttggatctggtcaataagtttggattccagcgagacagcatgcgcaacatgtatgaccacatgatgactattctggactctcgtgcctcgcgtatgacccccaaccaggcacttctctccgttcacgccgactacatcggcggccagaacgctaattatcgccgatggtactttgccgcccatctcgatctcgatgatgcggtcggtttcgccaacatgaagctcggcaaggcagaccgcaagacgcggaaggctcgcagggctgcagccaaggccgccaaagccaaccccgaggacgaagaggaaacgctcgaggctttggaaggagacaacagcttggaagctgcggaataccgctggaagtctcgcatgaaccggatgtcccagcacgaccgggcccgccaagttgccctctatcttctgatctggggtgaagccaaccaggtgcgattcctgccggagtgtatctgtttcatcttcaagtgtgccgacgattactacacttcgcccgaatgccaggcgcgcgttgaaccggtggaggaattcacctacctcaatgagatcatcactcctctctaccattactgtcgagaccagggatatgaaatcatggacggcaagtatgttcgtcgtgagctcgatcacaacaacatcattggttacgatgacatgaaccaactgttctggtacccggagggtatcgagcgcatcgggtttgaggataagacccgcctggtcgatattcctatctctgaaagatggcccaagttgaaggatgtggtctggaagaatgccttcttcaagactttcaaggaaactcgctcctggttccacatgatcacgaacttcaaccgtatctgggttatccacctgggtgccttctggttcttcactgcctacaacgctccaactctgtataccatcaactaccaacaacaggtggacaacaagccaccgacggctaaatacctcggcgctgtcggtttcggtggtgctcttgtctccttcattcagattctagctaccatttgtgaatggatgtacgttccccgacggtgggctggagcgcagcacctgcacaaacggttcatgttcctcattgtcatgttcattatcaacctggctcctggaatcgtcatcttcgccatcttgcccatgctgaaaatgtcaaccaagacagaaaacggcatcggcctcgccatcggtattgtccactttgttatcgcagtcctgacagccactttcttcgcaatccagcccttgggtgcgcttttcggcaattacatgaagaaaggtggacgccaatacgttgccagtcagaccttcacggctagtttctatcgtctttcaggtaacgacatgtggatgtcatacggcctctgggtctgtgtgttcggtgccaagttggcggaatcctacttcttcttgacgctatctttcaaggatcccatccgcatcttgtccccaatgcagatccaccagtgtactggcgcgcaatacattggcaacaccctttgccaccgacagcctcagattcttctgggcttgatggctttcatggacttgacacttttcttcctggatagttacttgtggtacattatttgcaacacaatcttctctgtggcgcgatcattctatttgggtgtgtcaatttggtcaccgtggagaaacatcttctcccgcctgccgaagcgtatctactccaaggtgcttgccactaccgacatggagatcaaatacaagcccaaggtcttgatctcgcaagtttggaatgcgattatcatctccatgtaccgtgagcatcttctcgccatcgaccatgtgcagaagctgctttaccaccaggttccctccgagcaggaaggaaagcgcaccctccgcgccccaaccttcttcgtgtcacaggaagatcaatctttcaagactgagttcttcccacagggtagtgaggccgagcgtcgtatttcgttcttcgcccaatcgctcgctacacccatgcccgagcctcttcccgttgacaacatgcccactttcacggtcatgattccccactacagtgaaaagatccttttgtcgctccgcgagattatccgtgaagatgagccttactcgcgtgtcactttgctggaatacctcaagcaattgcaccctcacgagtgggattgcttcgtcaaggataccaagatcctcgccgatgagacttcgcagttcaacggtgataatgagaagcccgagaaagacgctgccaagagcaaggttgatgacctgcctttctactgcattggtttcaagtccgccgctcccgaatataccctccgcaccagaatctgggcttccctccgatcccagaccttgtacaggactatttctggcttcatgaattacagccgtgctatcaagctgctttaccgtgtcgaaaacccggaggttgtccaaatgtttggtggtaactcggagaaactcgagcgcgagctcgagcgcatggctcgccgcaagttccgtatctgtgtctccatgcagcgttacgccaagttcagcaaggacgaacgtgaaaacaccgaattcttgctccgcgcttaccccgacctgcagattgcatacttggatgaggagccacctctcaatgaaggcgacgagccccgtatctactcggctttgatcgatggtcactgtgaaattctcgagaacaacttgcggaagcccaagttcagaattcagctttctggaaaccccattctcggtgacggaaagtccgacaaccagaaccattgcatcatcttctaccgtggtgaatacatccagcttattgacgccaatcaagacaactacttggaagaatgtttgaagattcgcagtgtcctggccgagttcgaggaactgaccactgataatgtttctccatacacccctggaattgcctcgcctgacgagaaccccgttgccattttgggagcccgtgaatacattttctccgagagcgtcggtgttctcggtgatgttgccgcctccaaggaacaaacgttcggtactcttttcgctcgtacactggctcaaatcggtggtaagcttcactatggtcatcctgatttcttgaatgccactttcatgacgactcgtggtggtgtctccaaagcccagaaaggattgcacttgaacgaggatatttacgctggtatgactgctgttctccgaggaggtcgcatcaagcattgtgaatattatcagtgtggtaagggtcgtgatcttggtttcggatccgttctcaacttcaccacgaagattggtactggtatgggtgaacagatgctttcccgagagtactactatctcggtacccagctgcccctcgatcgcttcctctcattctactatgctcaccctggtttccatctgaacaacatgttcattatgttgtctgtgcaaatgttcatgtttgtcctgatcaaccttggcgccctgaagcacgagaccatcatgtgccgttacaactccgacctgcctattaccgatcctcttgtgcctactctctgcgccaacctgattccaatcctcaactgggtgaaccgctgtgttatctccattttcattgtgttcttcatctcatgggttcctcttgcagtccaagagctgacggagagaggagtgtggcgcatggctactcgtctgggcaagcatttcggttcgttctcgttcatgttcgaggtgttcgtttgtcagatctacgccaacgccgtgcacgccaacttgtctttcggtggtgcgcgatacattggtaccggtcgtggtttcgcaacggctcgtatcccattcggtgtcctctactcacgattcgctgggccttcaatttacctgggcgctcgcctcctgctgatgctgttgttcagtaccacaacggtctggactcccgctctgatctggttctgggtttccctactcgcgctgagcatttcgcctttcctgttcaacccccaccagtttgcctggaccgacttcttcatcgactaccgcgactacatccgctggctttctcgcggtaactcccgatcccatgcttcctcttggatcggtttctgtcgcctttcgcgtactcgtatcactggttacaagcggaaagtgcttggtgttccatcggagaaaggctccggtgatattcctagggcgcgaatcaccaacattttcttcgccgaaattgttacgcctctgcttggtgttctggcaacaggaatcccgtacctatacatcaactcgcggacaatgtattctgatgatcccaagtgggctgcgaatcccatcattcgccttgcgattattgcttttgcccccgtcggtatcaatgccggcgtcgcgggtatgttcttcggcatggcttgctgtatgggcccattgtttggcatgtgctgcaagaagttcggtgctgtccttgctgctattgcccatgccatcgctgtgattatcttcctcatcatcttcctggccatgttcttcctggaatccctcagctggccccgaaccatctctggcatgatcgctgctatggctctccagcgcttcctctacaaggtgatcattgccctcgctctgacccgtgaattcaagaacgatcaatccaatattgcatggtggaccggaaaatggtacggcatgggttggcactccctttctcagcctggacgtgagttcctgtgcaaaatcactgaacttggttatttcgccaacgatttcttccttggccatgttctcctgtttgccatgctcccggccctcgccattccctatgtcgacaccttccattcggtcatcctgttttggctgcgcccaaggtatgtagctcctcatctccacactacgaaaactctgtactaacgaagcatgcttctagctctcaaattcgccctcctatctactctctcaagcagtccaagcttcgcaagagacgcgttgttcgcttcgccattctctacttcttcacgctcttcatcttcctcattattatcattgcgcctattgtgctgcgaaatacgaagcaattggatagcatcttgtccggcggcatctgggacagcctgggtgtctctaagccgtcttcgattggtcttctgcaaccacttgatcacggactcaatgacaccgtctcctggtacactggctctaatatccccaagggctacacctcaggcagcatcccagccgcctccgagggcaccggaaagtggtccatctaatcgccttggcgaaacgacatggaaatgccttgtacaaagttatgcgtttactaaaattcgctgcatttttctgaactcaccggcgcacaatttgatattaatgaatggttgcttccaaatattgtttgtggaatgacgcttgtatgaaggggtcttccaagtcatcctcgggggtttaccttcgtttcaccagctttctttgcttgttttattttacacttctaccggaattaaattgcattgctttcaagaaaatattcttcatgttcgtaatccctaatttcacagtagaatgtccaaagaatatgcaatgcacgggtcaatagatgggtcacgtgtaccgaggttcccaacactccgagtctcccgtttcatcttccctccgttctccacgatcaagcaccactctttcgcgtctcttcttaacctatcatctctcaggtatctcgctggcctggcgtaccgcataaaccgcgctctcttcaaccctccgccatggatctccaggagacccagcgtatcctttccgaatatctgcacgaactcgcagatctattccaccgtgtgcctggctccgcaatcttcctccgctacgtgaaatccagctatcaagatgacccaattcgttctgccgtcgaacttttcctcttcctctttgccgtgcgataccttctagcgcccaagtattcgaccaaaccgggcgtggtaccactgacggaagacgagattgacgacctcgtggacgaatggaccccggagcccctggtcggggacccgacggccctggaagcgatggaagttgataagcggaccgtgattgttgggtatcgtaccccctattgcttctgcctgacgatactccgcggatattttactgacaagtggaatccggctctgtagccctgtaggcccgaaatcgaaactcaccaacggccgcactgtgatgaaccttggttccttcaatttctacaacttcaatacgaatgagtcgctcaaggaacaggctatccagacactccgtgcttatggtgtgggtccatgcggaccgcgtggtttctacggcactcaggatgttcacataaagactgaggatgatgtcgcgtcgttcttggggaccgcggcttgcattatctactcccaggccttctctaccatttctagtgttattccggccttctcgaagcgtggtgacattatcgtcgcggataaaggggttagctttgctattcgaaagggtattcagatctctcgaagcatggtccgatggtatgaacataatgacatggaggatttggagcgcgtgctcgcgaaggtcactaaggagcaggcccggaagcccctgactcgccgattcattatcaccgagggtttgtttgagtcttatggcgacatggcggacttgcccaagatcgtatgtgaacccgttacatgagattatgaattggaatgctgacaactgttgcagatcgaactacgactcaagtacaagttccgtttgattctcgatgaaacctggtcctttggtgttttgggacgcactggccgtggtatcacggagcaccagaacgtcgatgctgccgaggttgatatgattgtggggtccctggccggtccccttgttgctggtggtggcttctgtgctggttcagaggagattgttcaccaccagcgtatttcggctgctgcttataccttctctgctgcgcttcccgctcttctttcgactaccgccagtgccactatcaacatcctccagaacaaccctgagacagtgtcacaacttcgtgaacacaccaaggctatgcgggctcaattggatccccgaagcgactgggtttactgcactagcgcgcctgaaaatcctatcttggttttggtcatcaagccggaggttgtggctgctaagcgtctcacagaagatgaccagcagttcttgcttcaagatgttgtcgatgaggtatgtctacatgttttttcattttaactgaagtccatttctaatatccgcagtgtctggccaacggcgttctgattacgcggctcaagaccctcgaggacaacttccagcctaagcaggttatcccgcccgccctgaaggtgtgcgtcactaccggtctcaccaagaaagagaccgaaaaggcaggaacgattattcgacatgccattaccaaggtgatgagcaagaggaagtaatgccctcccccgccgcttagctctggtcctgaccagccattcgatgactgcccacgcctatatgacggactccatcaatttaccattctcctcagtcgacctacgccctaatgccttgtattgttactttgtcgatatacattcttattgcatcccctgcacaggcccaccattttctctttttgttggcggttgatcctatacctgtgcatggttctaagttgtttaatactacccttctgcccttggctgtttgcttcaaggatgtctattttgtatacattattcagatcaaaaccctcttcgtcccatgaatggacgctattgctatatctttcgattctttgcttcaattgttctttgctatagtagtatacactggacctcagcagcaggccagcagcctcatatctccaggccagactccaaccatataaatgccccttcctccgccacccccttccaatgtctctcaataatatcagataacatctcgctagcattctacttcacatttaccgaattcctcaatgtgtccaagcggacacccgagaatgggccccacattccatctcctccatcattgggagcattcatggttcatcgccgacttcgagatcttgtacgatggccccgcacgcaagatctcctcgtcgagcgaatcagacgccgaaggatttctcaaccaagccaaggggcatgtttgagacctggaagctccctgattccattccctagatctaagcgctatgcttggctatccttgtgtttacaatctctaccaattgagtccacgtaggtcgatctgtgctccagcccgccagcatggttataatggatcggatcggcaacatatgtgtgggtttccagaaggttgcaaagttactcatgttatagacgtcgactaagttcagctaacttcactcgagtgtgttgagatcagtctcccccgggagaacctggctgcaaaatgaagcgccttactcagtcacttgttggcctgctacttgcctgtggtgtttgcgccgaagctgggggtaagaacgatattatccatgcttgtaaaggattttgctgatagcgatagccgacaaacaaccccgtgcaaatctcgctcaaccagcctataccaaagaggtagtcgtctgggtcaatgagaagggagaaaccatcagcacggaaacacactacgtccaggccttgacctctgcgctccaagagaatgttagtagatagaactgttcccgaagaagagaagagatgttggttcctcatcaaaagccagccctaactctctcatcaaagcaaccctcaatatcaaccccggatacaaatggtgcaccaccacacgccctatctaagaacagcaacgaccaccccgtcccagccaagggcaaacccaagaatctaccacaccacccacacaagcaccccaaaccagccgtctcccattcccaccaaaaccaacacccaaacgccaacttcggcatatcctactccccctacaaagcagaccgcacctgcaagaaccaagaagaagtaaaccaagacttagaccgaatctcctcatactccttcatccgcatctacggaacagactgcgaccaaaccaaaaccgtaacgaccgccgcccgccgccacaacatgcaagtcttcgccggcatctacgacctaaccaacttcccctccagtctagacgccttcagcgaagcaataacagatccaaacggcaaaaaagactggtcaatcttccacacaatcgccgtaggcaacgagctcgtaaacggcggcaccaactccgccaccgacgtcgcagccgccgtacaaaccgcccgctccatcctccgcgcacaggggtacaccgggcccgtcgtcacagtcgacactttctccgtgcacctcgaccacccggaactctgccacgtgtccgactactgcgcggcgaactgccatgctttcttcgacgccacgcagcagcctgctggcgccggcgcttatgcgctcgagcaggcgcgcagtatctcggctggggctggggggaagcgtactatgattacggagtctgggtggccgcatgctggggatgcgaatgggggtgcggttccgtcgaaagagaatcagttggcggcggttgagagtttgaggaggagttttgagaagaggagggaggatttggtactctttacggcttttgatgatttgtggaaggatgataatatgtatacttttaatgcggagaagttttggggcattcatggagggttgtagagctggtggaggttttcttttctgttgctcagttaagttggcttttgctctttctttggctggatgcatgcaattgttcgtgtacatagatcactctggaattatcggatagtcgaatgaagaacgaggtattaacaaagtttgatatggttcgctgatgatactacttgtacatgatattgcagactatacattagaagcaatccgttcaggaacaaacagagcttagctgcggaacgtcagagcagcctcgcgttgcttcgcctcttcctccgaacgcgcctcgatctgatccatccagccatccttacgggtaagctcatcgaaagcctccttgttcgacggaatatcccagaagaaatctttctcgctcggggatgtccgatgagcctccacgtcccgggcatggcgaataataagtgcagtcagcatgccgcgggacttgctactcgggttgatgcccagctggttcatctcccgcaggatcgatgttacagcgggaagatccttgcatacgcgccagtggtagtggatcaactcatcgtacaatccagaggaagcaccgaggaaagtagacacacggccgtactctttgatcgtcgagcggaattgagggatgagtggggattcgcggaagtgcgtgttcagcacgcggaaggcgatcaggagggtcttcgggtatagagctactacgacgggggcgactgggacaacggctgggacgcggaggggtcctgatggccgggtgggtggttcgggctggtctgctgtgctcacactctccgggtctgaagcctccacgagagatttctcgtccaggtggcgcagcatggagaagatgcgctctttgcagacctcccacacgcccagatcgcccttgccttcctcgatagcttggaaaagtgcgaattcgatatgctcggattctgcttgcacgacgatctctatcgcccgccgcaggctgacggttacttcggcggcggtggctgtggcgggctcggtatagcccagatcgcggagcttgattcgctttggaccttggttctctgctgggacttgttcttccgtttctgacttctctggtcgtcggtaagaggagtagtcgtccttcgcctgctgcttggctttcgtatctgccctctttcgtcttgggtcttttagcagattgtcaaacaccgacatgagctctgccatttcggctttcttctcctcgctcattggtgtcgatgagctcgcctcggtagtttccccatcgtgtttgaatccaagctgctctaagagtcctccgaatatcaatttctcctggctggtgatcttcggtgctatcttcgttgtcttcttcacgacagacggtctgaggctaggcctttcagatacagatgctgcgcgtttctgcagatagcttcgtcgcggtttcggagctgcctcggtctttgagctgttggtaattggttgttcagaagcattctgacttgtgttatcctccgctaatgatttgttttctgttgcatcattggcctcggcattgttctgggtagaaaaagagcgcggaaaacgacgattgaattggttccgagccgcggatgagagtggtgtaagtgtgcgtgtttgatataggaaaggtgccgtggaattgcttcttgagagaaggcatagccggttgatatttgtcgccatagctgcgtccttaattgcgcagccttgttcttgcacttcttagagtaaatccaacctggagtaactcttacttcttctctttcacctttcaactttgcaacttcactctaaaaaaagaaaaacaaaagatcactttttctttaaagagcacggactccggtgatcaacttccctcaaagtcacgtgatgtcgtgtaactggcccacgcgtttccaagacgtgcctcgcaccccagaggcgcaaaccgcacgcgaacccggtacgcctgagattcccgaaacgaacatgtcggggaaaactgagttgtcagacttcgaacagcagcgcttagcaaatattgccgagcgcgacgcgctgttgaagaaactcactctcgaatcgcaatcctcgggactcttcgcaagccctaagaatccccgcagcaatggcgtgaaaccgaaaaagcgcgcagctcctaaagtgaagactgaggaagttatcacaccgcggcgtacgtcctcacgccttaagggcattgcggccgaaagtgaagtagcaaagcgcaaggccgacgacgaatatgaggcgatgcgcgaagcagatagactcaagaggatgcgccggacagactcattcagtcaggcagatatgtttatttctgggcagaagcttagtcctgatagcctgatcggcgtggatgttatcaccaagggtgttgcgaagccctatgagaggaccttcgggaaagatgaaattgagaagacgacggacaaagacctgaaggctcttcggaaggagatgaatgggttgaaattgtgggagtcttgggatcctcaacgtaatcactatactctccacccacaagctaccattctgacacattttcgatcattacagggatcaagatcaccccggagcgtgtgtatagcatggtctttcacccatccgaatccaaacctcttatattcgcgggtgacaaactgggtcatctgggcatgttggatgcttcgcaggaaaagcctaccccgggtgaagacgacgacgaggatgactttgatccagatccagtcctaaccacattgaagccacatactcggaccattagcgcaatgatggtcaacccctcaaagccgacacatctgtatacggcaagttacgacagctcgattcgatcactggacttggagaaaatggtctcttcagagacctatgctcccgaatctactactattgacgaggcactctccggagtagacatggcccccaatgaccctaacacattgtactggactacactccagggtggattcgggcgatacgatacgcgaacgccgcggaaagataccaatgtgtcaaactgggaactctctgagaagaagatcgggggcttcacactgtgtcccacccagcccaactacttcgccacggccagtctagatcgattcctgagactgtgggatctgcgcaagctgtcgccggaggatcccactcctgttgccgaggatgaaagccggctgtctgtttcccacgcagccttcaattctgctgggcagattgccacctcgtcctacgacgacacattgaagatatacgatgtgggcgcgaagggtctcttttcgtggaagcagggccacacactttcagcaaaggagtttaagccagacacagttgtccgccacaactgccagactggccgctgggttactatgtatgcttatccctctctttcctttttcgcatcccttttcgttctgccaagtatcattacctaactttgttcttctagtctccgccctcaatggcaactgaacccgcaatcttccatccagcgcttctgtatcggcaacatgaaccgttttgtcgatgtgtacagcagcaatggggatcagcttgcacagcttggtggagatgggatcacggctgttcctgccgtggctgtattccaccgtagcaagaactgggttgctggtggcaccgctagtggcaagctctgcttgtggaagtgatatgaatcttcgctcatcttctttatgcagtgtgaggctgtataggttatttgctaattattttactgtgttttgagcttcctttgaagattcggtgttgtaggaggcgtgttgcctaggattttgtttatcccctgctgtgttgttatgacgacagacttgctattgttttccaatgtacagagaccttgatctgttatttctatctaataacagtcacaagcttacaaaaatgagaacaccaagccattccatctattggaaaaacataaaaatagtaataggtatttacacgatggccaccatctccagaggaatccgaacacacaagaaaaagacccagatgattcctcagaacgaccaaaaagagaaaaacacaagagcctcagccgagttcaaaatcagatcgtgttctttttagctctctttgtttttatcttagagctagactggaggagacgtgtataagggagggcgggaccatgaaacacacaatcaaaagaaggaatgggtatcaacaccatgacacatgctttaggggagaacatagacatatagatgatcaggcagaacggaactcgaggcaaaagatggggataaaagaggaacgttggaatcatgagcaatcataagcacatgggaaagagataggcgagaaagaacaaagtcaaaaacacgtaagaatgaaaggagattgcatgggcaggcattggtgcattaagattcattgcgtagatcctcgtgcgagtggttgttttgattctggtcacgttccttagccttgcgtcgggagggagcaggaacaaagtcgaagaagcggtacttgctcgaggaggaggactctttcgtgacgctggccctgcgtgccttggcagtatcagagtactcgagagagtaggtcgaggagttcttcgagcttccggtactgtcacgtgggtcagaccagcgtgggatggcaaatggaatgcggctttgatcccaggtcgccgatgacgagcttggaggagtgtcatcctcgggatcgggaacctggtcagtggagtggcgagctggaggacgcgtagggaagtagccagtcgaattgcgatggctgcttggggcggtaccaactgccgtttctggcgctggagtgccgggtttgcttaagctctcgtcgtagaaggtaacaggtcgctccatcgaatcgaccagtgcttcccatttgatctcaaggtttccactcggccgttctgcttgctcggctcgtttgagacattcctcggtgcgtgcccgcaggcgaagggcttctttttggaacttggcaaggctgacgtccagctcggtcaattcgttgagtcgttccggggagacatcaagccagactcgtatcaagttcgcaaaggagcgggcatggtcaatgagaaatggaaggctagggaatccctcacgcgatgtggggggcaaccgcccaaggatttggataggggtggtgtaggagggtgtgacgatggggactggtcgatcggcgggaatcgcacaaaccgaatcaataaagtctttgaattccgtgcgatgaccaacgaggaatttgttcatcggttccatccaaggttctttattgccgaatgttgtcatattggccagaccttgcaaagctttggcaatgagggtcaaagtgcgctgtgcacgaggacgagggtgatctggagatgattagcaaaaggacaagtcaaggtacgagcgtagttccatacctttcaaaagcccgaacaatttcgggttcagaatagccgggcagaagaagcgtaggaagaggaaaccagaaacactactgtacgtcacggaccggaggaagtcaccataacgatcgtctgcacacgccctgacatgccggaagatgcgtcgcagttctgggggacacctcgacgcagatcccgcaatggatttccacacgcttgtggtgagagctgtaaggtttcgccagttgcgttcaagatcctcctggcgtggaattcgagacggatcaacttcgcattccggatcgctctcatcaatatcgcgtagtcgttccgcgacagtctcctccaagtactgtttgcccaaacgacgcatgtgaagatcgagggccttagttagaagcgagtttccacggaacaagaggttagcctccacagtggccgtccttcccatgtctctgacaaggacctcgcgctcttgactagtctcctgtgggttggtcgaatgaatcctcgttgtatacctcagccggttggtggtggattctttgtgaaccccatcgatttcatcttcaaccaaggctgagatccattccaccgttgaccctgagacctgataaatgttcagaagcatctcggccaggtgatttagctccgatgacatcagttgtgccatgttgattgtcaggccattagtgaaggagtggagaagttccgacattgccgagtactcatcggacatcaagacgacagtttcctccatccgtgctctcatgaacatctcgccaattgcctgatcttgattatccaggataggccaccacttttctatatccacgccggcatccaattcttcgagtcgcaggtctacccgtccgaagacaatatcatttgcggaaatttcaatttcatccagcatgttcaccgcattcacgtcttggttgggtgcgtatgttccatgcgcgataagtgtccagtccctctgtgtcgggttgagggttttaacgaggatagaggcttgggatagtactggcggtagatcagtgaagataaaatcttctcgccagaaaggattcatggtgcgatacttgacagcagtcttgccacgaatttccccatcgaggagcacctccgtgtaatagtcgctgaccttcgagcttggaacaggctgaccatgtgatcttgatgcctttcggcttcggggagtgtcctcctctatggggcgaaacagcttcgcctccacaattttcaagctcaagaatctttcaatccggaacatgtcttttgtcactgctacttcgtttgcctcgctttctggttttcgatcccctcccttagacaccggaccatagagctctgggattgtaaatgcacggagaagtacaaaccaaacctcaaagagaacacggttttcgagagcgaggtatataggccgcacgttggaatcggataccgggtgtgctgtatattgaggatagatggcaatgcaaaactcatcatccaacaccgatgagttcagctgctgaatagcacagcgtgataactgggacaactgcacatatgctaagagagcgacgtcggactctgtgtagagcttgaaaaagccgttttcttgtagtgtgcagctcaccttctgccacgaggaagaaagagcccttgattgtcggtacgtagatacgcgacgtccggacgacggcattgcaccggcagcagacggtttgtcccatagaagcatcttaccaactttgatgatagttgcatccttttgtgatgcggtttccgagttgcgtcgacgttcggggatccgtcggtctccaatcacaacctcttgaggctttgtcatcttgttctgaacgcccttgggccgaattggttgccaacaaagtagagctgcaagccaagaatcgaaggtttcgttcacgtgcggtcgtagttgtatcccaagccccgaggtaaatgtgtgaacgctcagataggtgcactggagctcagggtcccacaatgtccgaactcgacaaccacgtagatcaggaattaatgttttggccaatgccggctctcccttggcttggtaaatgagacttccagtcgcgacgttgatagcgcagtatccggatgtccaggcagtggtcgaggctgttcgaaaagatagaatgccatgcattctaccgcaggtggtcttcatcagctgcaggatcttggtgccttccgcactcgagaggggcgcgccaaatgaatcttgattttgtgctccaccggcgaccagacctgcaactttgctcagtcgatggcgagggacggtctggctgttgtattttggggactcaattgacggaaaaccgatggaagaagatggatcgtcgggcactttcgattgagagggactggccgtgttaattgacccaacgcgagttcgagttttgttggggttgacgtcgctgtgctcgtcagccgctgttgtccttgatcgcgcccgttgactccttgcttccagcggagaatcttcttcgcctgctgcagatgaatgtttgttgaaatcccgacgacgttctggttcgacgggccgtgatcgcacggtgtttcgagctgaagacaaagcgccgcccgtgaggtgctccggttcggatgagggggaattgttgacagagggttgtgactctggcgtcacagttcgaatggtagtttctcggaaactgtcgggatagaccataccatgccggtccctagatgaagacttcttgctagcacgccgttccactggacgactgtataacgcttggtgcatcgagcttcgcttgtacgcgttcggattctcgggctccatctcgttctgttataggacagccccttcgacaggcgatagagacaaaccgaaaatgaaacccgtcaatatgttaaaagaggagagacggacaggttcactcccttgtcgcacccaacacaacctccctcaaaacaatcggtgaaagaagagcttgttggcaactgacgtatgcggcacggctgcgcttgtataattgaggatcgcttttgcccaggagattgttatgagacaacatggagtccggtgagaggttgggtattggggtcgcacattcggtcgaggcgccgggagaggggaagtagtaatgggaggctaggacaaaggaggcgcgggtcaccgtcgtttgtctgagagatgcaggagaatctaacgaatgcgctaagcgtccaatggtccggccagtcgatagcgagggtgtcgctgtcagtgttagtggtctgaagaagcggcccgatagaaattggtagttgagaagggcgtgaagtgatatcattattagagggaggggagggggtatggggtagggtatatgggagtaaagacatgcgcacataccttcatcagtcccttttgaaattgggaaggttttgcttatgctctttaggagaggtgtgcgtgtgtgcgcatagaggtgtttttgcggattccagcagatgtaggccgctttgggacgggggcagaatgagggggaaggtcttcaaaggaaaatatttcccattaatgaagaatcaagttgaaattgcaatgggaagatccggtaaagatcgccaaaagccagagagagagaaagagagggagagggagaggggaggggggaggggaggagagaaagaagtggatagcggagctgaatctgtatatgggaaaaataacgaaataatgaggaatggcaacgctttctgacccttttgcctctatcttagtctctagagcttgctgcaagtctattattggctatatccgtcaatttatacttccccccatgttttaggctacctggatgacagcgcaacgtggatgggcacgttctatatacatcctaatcatccccagagcaagtgagcttggactatttacctcgatactccgtagatgtagatccaacccccagcctttcagcttcagtttaagcctttaaccgaagataccgagtctatattgtaatatcaccggagcaagggaagaagtaaatagcgggttgaggtgaagatcaatagctttcggatttttcgaaaatggtcctaaactgccgagagattttctagaagtcgggataactgcatggcgtctttctgctgactcgcactggctgcggatcaccgggctagtggaaatgggccctgaagtcttgagtcatgacggtcatgcttgagatattgatccctttgtggccgtgcatcgtactagtatattatattataaatgcatggattcatatgctcctgacgatggcaaccttctccttgtatttggattaactctatatgattctaaatgaatgtttctatacggtctgctctgcaatatgcaaattcaaacgtggtgtccggggcgcagatcctggccccaactatggtacatatgcacctaggctaacaccttgacgcagtaggtacttttgattcgctctagttacttatacactaatagagacattaataatgtcgtagccggggaggggagtctctactaaaacaggttgagggaaatctccgaaagtggagtcaattgttagtctgtagcggttaggaaatgagatcttcagccaggattatatactggagtcacacagaactaagttcagattgagccgtagagagatgataaatatgagcatgtaagcatataagcatatctgattttgaagtattcaacacaaaaaatagcaagtcgcaatttcaaagtgcttcttactcagtacggtacggtacccgctcataaccatcgtagatgagtgtattgtggaactgtggatcaatcctaaattgttgtactttaccagtgggttctggaagtcttccatgcacgcatttaataacgtcggccagggaagcgattggacgacggggcactgcggattcgagacgactcaagaatgccggagacaagcgtaggcagtaagatggacttttaccgacggtactcatagcttggcatgccgcagctagtgagtactagtactagtactatatggtggacggaaacaggccgcatagcgtcctgttctagcagagctgtggggtgaatgtcgtaggaccgatagaggttcggagcgtgaattcattgtggagtccctccgatgttcgggaagatttattcaggtatgctccgggacaatcttgtacgaggcttgaatatctgctccgctcgagatagttgtagaccctctaagctagtgaggttgcagcaggattcgaaatcaataagataattttccgtcaggagttatgcaaagaaatccattctagcccaaatctatggagctggcgattgaataattatagagtcaatgagtgagaagaatatggaggtagaatatggataggttagtactgatggaggcaaagtaaattccggtatccatatcacctgtggagataagataaggtccacaagggcccaatcacgtgatacacacacatgactttagattgctgcctgaggccatataccccttctttatgtcatcatagctatcgggaggtctggggaatgatcatggctcctggtgactgttatcacgaggactaaatcaaaggctactattttataagctggtacagtcaccttaattagggtgcatgctcatttgaaacacgattacgttcagtctgttgtattgatagtgatccccatttatccgcatttcaagcgccgctggatggcatttcattaccacgatcactggcttctgaagctgttgccatgaatggtctgactatagccttagtctgattcaaaatgatgtcctctaacatattatcacggttcctacctccaacgggctcacgatcggtctatgagaccattcgccaacatgacgtcgggtccgaatactctgatctcgaagaacgtgcgggcttggtcatagaagaccaacaggaacaatttagtgaccgggaactggaggatgcactagcggatgcacaggatagtgaaataatcagccccagcactgcattgcttgggcaggcacggtcgggcaaagcacctgaagagcgagcttctccatctggcacccgccgtcgcaagtcgtcccggcctcggtggatgccacaagaatcaccactcggatatgagctcgatgatcatgatgaggacgtccctcagtctctgctggtggaaggtcatcacgaagatctgaaatcacagttacctcctcctccccgacttcatggtcgtccggaccgacgaagaacccctagccctggtccatcctcacaacacaccggaacacgttggaatgaacaagcagcccatcaaacactgcccagtgaaagcggtcatccaatagggagatggttcaccggccaacaccctggtcttgccaatgttgaccccaagaagaaggcaatgtggcggtgggcgaacgtcgaggatctggataacttcttaaaggacgtctacatatacttcttagggaacggaatttggtctattctgctgactcgggtgctgaacctcttgtaagttcacgatgaaaccctttccaaagcatcctaggagaagctgacagtacacacaggacatttgcattcgttgttggtttctctacattcttaaccaactgcattgattattctaaggttcggcgaagtaaaactctggatgacatcctcgtgcctcaatgtacagcaaatatgtccgggtcgtccacatttttgctgtggctttttagcttcttctggattgggaagcttttccagtacctactagacattcgcaggctcaaacacctgcatgacttctatttctaccttctcggcgtctcggatgccgaggtgcagacgatttcatggcaagaagtggtcagtcgactgatggcgttgagagattcgaatccatctactgcggctgcggtttctgccaaacatcgaagattcctgggcagccagtcaaagcagagaatggacgctcacgacattgccaaccgcctaatgcgcaaggagaactacatgatcgcattagtgaacaaggatattctggaccttactctccctatcccgttcctcaaaaatcgacaactcttctcccgaaccatggaatggaatctcaatctttgtgtcatggactatgtctttaatgagcaaggccaactgcgaaccctgttcctcaaggacacgcatcggagagccctgagtgatggcttacgtcggcgctttattttcgctggcgtcatgaatattttcgtagcgccctttattgtggtctattttatgatgcactacttcttccggtacttcaatgagttcaagaagaatccgggccaaatcggttcccgtcaatatacacctatggcggagtggaaattccgcgagttcaatgagctttggcatctctttgagcgtcgaatcaatatgtcttatccattcgctagtcgctatgtggaccaatttcccaaggataagactattcaagtggcacggttcgttgctttcatctctggcgctcttgcctcggtgttggcccttgcctcggtgatagacccggagctcttccttggatttgaaattactcctgaccggactgtgctattctatcttggtattttcggtacagtctgggcctttgcgcgagggctggcacccgaagagaccgatgtcttcgaccccgagtatgcacttctcgagctgatcgattttactcattacttcccgtccggatggaaggggcgtttgcatagcgacgacgtgcggaaagaatttgcaatcctctatcaaatgaaagttgtgatattcttagaggagatcttgagcatgattttcactcctttcgtcctatggttcagcttgcccaagtgcagtgaccgcctcattgacttcttccgggagttcaccgtgcacgtcgacggggtaggctatctctgctcttttgccgtattcgacttcaagaagggcacaaatgtgctttcccaagccgggcccgggcgtcgagaccctggcaaacaggacctgcgcactgattacttctcaactaaagatggcaagatgctagcttcctactatggcttcttggacaactacggtaccactcatcaacctaacagccgacgacaattccacccaccgccaaccttgccaaccctcaactcacccactgcagccgagttcggtgctcttcctgatcgccctgaccatctccatgcacgcactgggccgaccgccggtgtgccatttggcgctcaatcaatgatgggagactctaaactaaggcaaatgggaggattcgatcaccgatctcctgctccatccatcctgcttgacccgcaccaccaaccctcaaccactgggttccgcgccgcccgaaccagcccccagcagcaccatcgctcccggctcggacacccgtctacggatactatcgacgacgaagaagaaccattatcccaagacggtcgtgaatcaacaatacggcagtcgggtgctcgtaccggtaattccagtgcaggtgcaggcactagtgacggtaacctcggcggttcttggcgcatgaacccactcagcaaggacgaggatgatcctgatgagggcgatgaaggtgaaaatatcgacgccattgctggtgggggcggtgttttggggttgattcagcagttccagaaagttaataccgaaggcagacggacggggatttagatattcatctcctgtgccacttcttggtggtaggcttacttagaaagctcgttgcttatatgcttcagacacgatatatgaccatttcatgcagcgtttagtctttcattgctctatcatccatttgcctgtcatgatgtcagcagtatgtttgtctactaactagtcctaagtcacatgcacccatgaacatcaggcaccttaggaatctgtgtaagcgcccaaataccgatacacctctgtgcccctcctttccctccgccatccctccatccctccatcgctcttgatgtgccttcctctttgaccttgcccaccgacaaaccacattcatatccacagaaacaacctagcatcaacaagatgctcgactgtatcggaggctgtatctttgggagactggcgaacgagccacgtcctcccaccgacccccgatcccctgagtccattgcctctgccattgtcaccacaatactcaatgccgacgaaccatactcgctcgacaaacaactgaacgaggaactttccaccgaaagttggaccgacgccatagcacaagctatcctccacggtctagagaatgcaatcaattccggcgcagacatggcgaaagccgcctctgatgctgcggcccagagcagaaacgctgctgtcggctttgcgacagaccatcctatgtacactacgctgattgcattgggcattctggccttgttgacaccttgggctcttgaaatccttgggtttggggagttgggtccaattgagggctcgtttgcagctgggtggcagagatcatttgctggatatgtgcctaagaatgctttgtttggctatttccagaagctgggtatgaaatggcgttggatttagatctgtctgagtatggtcctcctgatggaagttgagttcacttcgtattggcggctggaagttcgaggtttaccgtgcccaatattttactctctgtcaatttcaatcggttcctgaagaaacaaggtcgagcaatgccaatgaaccctactcctactcgctagacaaacaactgaacgagaaactttccactgatatcctccatggcttagagaatgcgaccaaatccggtgtagacatggagagagctgcgtctgatgctgcagctcaaagtagaaacaccgcatcggctttgcaaaataccatcctctcgaggatatacatcaccgataataagaggggtatccactgacgatgattatacctaattgggatatggttagcaacaatatactgtaattgactcaacttcacgtgttggagcttttggtgttaaaaattgagtaagtagtacttatttgtcttttcttttcattttatttacaaattttccatatgtatgtgctgtatatagtatgtgccatgcgaatttcccgatcggggtgacgctcagtaagcaagcttaatgattacgtaatactcagggggtgcccagtactaaagcggaaagggaaatccaacttgcttgaccaaagatccggtgtattgtatgactatgtatgtgactacggagtaccggagtacggagtacatcgttaactatagaataagacatgacaggagtgacttatttgccacgtgccatcctttagggtctagaaccgcactcgctatacaggataggctcctcgctcaacttaggttttagggacaaaacctagcttagggaagcattcagctagacctactactgacttcatgtacctcactagttcactaggtcaatgtaacataacctactagtcgttaccccgacctagtgacctgatgacccggcgaaccccctatttatacttgagtactccgtattgtgtaggatatatcttccggtccagattgctgtcgatgctcccatgcaatcataatcgcgcggattattatgtgtctttcggctgcaggggttattagcacaccaatgggagatcagccatgtggaccacctttgtgatggaggccgcgctgagacaagctagcggaagagtcgattgatgataggccaacatgagaaacccttacgggttgcatgcatttaatccagtgacggtccggaatctggggccaatggtcaacgttgaacagcctcgttattttattcgccctaaaagatgccgtctgggctgcaatctccactatgtcttgaggcccaaaaaccgcagttctccggggcattgaggaattgagagcatttcatcgggaaagatctctttgtacaagagaaattgaagttggaaaaaacataaaggaaagatataacatggaaataagagttgaagaaaagttgaagatgtcaaagaacagaaagaaccaaaatagaacggggaggctctcgtgtggatctttttgtttacttgtggagtctcgtgatttcatctggacttggctaatttccttggtgtcttcctttctccttcctttttttttttagtatttttttctcgaaacgaatatacctagaaggtgacagctcgcgatgtttcgagctcgccgataccgagttctggtcatattcgcggcggctgtcgtcttcacattcttccactttgcgcggtcacgcgattggagctatacagtgattgaagagtctagcgttcactcacccgatgctgcccatccgcaaaacccggccgttgctgctgccattgaggagagtcgaaaccgcgtgcttcccgaccccaatcgcggctccacctcctccccaccacagacagagaagatcatctcgcccgtgggccccaatagcggctcaaaggacaacaaccggtttaaagatccctccgacactccaccagtgaagactcccatcaagagtgatccgaaggactctgcgaaggactctgcgaaggactctgcgaaggaaccagcgaaggtgggaggcaccgacagcttgccaccaccggcaacggagaataccaatagcgtaaatgatgaggaaattgataatggagggacaggcagaatggcagcggagcgccctgaacctggcattccaacggccaagtggaagaagttccccgaacggttccccgtccctgcagaggaggtgatcaagctgccaaagggagagacgaagaaaattcccaagctgcaagcgaagttcaaggatgagtcgagctccggcaagcaagagcgcctacaacgccttagcactatcaaggccgagttcacgcatgcctggcgaggctataagaagattgcgatgggacatgacgaagtcaagcctctgtcgaaggagtttgaagacccattcaacggctggggagcgacattggtcgattccctcgattctctctggattatgcagttgaaagatgaattctccgaggctttggatctgatcaaaaacattgatttcaaaacgtcactgagagcagatattccgatgtttgagacaaccatccgctaccttggaggtcttttgggtgcctatgacatttctggtcatcgatacccagtgcttttggagaaagcagaggagcttgctgaggttctcattggtgcctttgacacacccaaccgcatgccgcacctttactatcgctgggccccgtaagtcttgtcacaaattcttcctgatcatctagatgacgactaaccaacctttctcagcgagtatgcttcgaagccgcatcgggcgtcttcccgagccggcctagctgaaattgggtcgctttccttggagtttacccgtttggctcaactgaccaagcgggacaaatactatgatgcgatagcccggatcaccaacgaattggagaaaatccaagatttaactagcatcccgggactgtggcctctacgggtcaatgcacagggatgttccaagtactccaagaacacacctccgcgtgatagtagccctacacccgagcaaaaccttgctagtgcaaccgagactaccactacggtgacccacaagacttacgctgcaccaacagaccttgagagctatttgaagctcatcccacgagacacaagccctgacatcgaaagatatgcccagcctgccaatgatacgcaagctgccagtgagcctcgcattcagtcacgcgagcaaaatacaccagcagataaatgcaatggcggcttgatacttccccattcaccccgcgataacgggtacgccatgggaggaatggctgactcgacctacgaatacctgcccaaggaatatctgctactgggtggcatgaacgagcaatacatgaatatgtataaaaaggcagccgctgcggcccgcaagaatcttctcttccaacccatggtgaaaggtggacgtgatattcggttcatggcctccactagtccaatgacacctggaaagattgcagagctcactccatccgatcttgaatacgaaggcgctcacttgacgtgtttcgtcggcggcatgttcgccataggagccaaggccttcggcatcgatgctgatctggaacttgcagccaaactgacggacggctgtgtttgggcttacgagtcgacacaaaccggagtgatgcctgagcgcttccgccttttgccctgtgagaaaggctcggcatgtgagtgggatcaagcccgctttgacattggtgtggcacgctactctcgcatagaccccggggcaggacattcgttccgcgacggtgagagcagctacgaacagcgcgtgaatttgatctcgcacgatccaccccaaggatcttcgagcgggtcggttcccatccccatgccgggctcattaaacccccacgatagcgatgtgttgtccaagcgagatggactcgcattaggaaaacgtgcggaagcaattgctcctgcttcaagcccgagccctacttccagtggaaccgaactggaggaccgggatgcacctcgttcgtcttcgtcgcccgcttcgcctcacatcgccgaagtcggcaaagaccacctccccgcaggcatgatcagtatcccgtcaccgaaatactaccttcggcccgaggcgatcgagtcagtatttatcatgtaccgtctgactggcgacgaatcctggcgtcacaaagggtggaagatgttcgaggctatttcgaagtatacccgaacggagctagccaacgcggccatccacgatgtcacagcccagaaaccgatccacaaggatacgatggagtctttctggctatctgagacattgaagtatttctatcttttgttcagcgaccctactgtcgtggacttggataaatatgttctgtaagtgactgacgtagcctgtaaacaaactctgaccaagaactgactttttacaggaataccgaagcgcatccattcctgcgcccacttgcataattatgttttacattttgataccaatgaaagttctttgttctataacacataatctcccatagacctcgtaataacgtacaagataatgtgtcccttagggttggcccgtagtgggactcttgaattccccccaatcccccgcccttcaactctctccaactcttcaagccggcacataaaccggcatgagctgtctggtgggaaatggagcctgaggtctcggagactgagttctggactggtacgttgttctcagcccactattttctcctttcaagataatgcgacatgacaattgaccggttctcgcagaacttcaagcgatcgtctccaagccctgtgactccgaagaccagatcgacgacgctctcagagcctatctcgatctagcaacccaacacaaaggtgaatggcacttcgacctccgagaagcgatgttaaacccaacgacactccgaaaccacgtccgctcccaactttccttccactacgactaacacacgtgcccttccctagatgaatacctccggtcggaaacagatttctcacgctgttcctacaagctattcacgtcgagtatattcgccacacatgcggactacgtgcgacgacagattctctacggtctgctgcaggacgacgacccggataccctccacttcattgcgtcattcatcctctttgacggacgacagaatgaagttgtgcttcagatgctaaatgaggagggcgcgtttgcgcgtctcctcgagctcatacaggcgatgcggagggcggatctggacggcgacgcgggtcttcatcgtttgttgatggaccttgtgtatgagatgtcgaggatacaaagggtcaaaattgaagacttgggtgcgttttggatacacgtgtgcctgctgctggtagctgattatggggcttgtgtgcagttctcgtggatgacgatttcatccgctgtctctttgatatcatcgaagatctctcttacgatgttaccgatccgtatcattaccccgtgatccgggtgctggtgagtactttcttcaggatcattttggttagaacgggattgacaaattgaccagctggttctgaatgagcaattcatgatctcggctcacaacccggtggacggccggccctctggtcatttgaccaacaaggtcatcaagatcctatcagtatatggtgggatgtataagacattcggggagaacatcattcttcttatcaaccgtgaaggtaacggatcctcctattcaataaaggcaatgactgacaatatgcagccgagacgtcccttcaattgcttacattgaagcttctctatctcatatttaccacccctagcacatatgaatacttcttcacgaacgatctacacgttctggtggatatattgatccggaacttgctcgatctacccgaggaggccgctgctctgaggcatacttacctgcgtgttctttacccgcttctagctcatacacaactacgatacccgccgcactacaagcgtgatggacttcgagggctactcagcgtccttgtccggggacaagtctcatatgggaacgacgcagaacacgagaaaatactgcattttgaagaggtcgatgaaacaacccgtcgacttgtcgcccggtgtgcgacagtggattggctacgtaatgttgaacagcccgacgccgcagaaacgcaagatacccccactcaagagacaacaactacaattgagactgtcctagaagaaggcgagcggcatgcgtcacctgtagatatgggcgaaccactcgatatttctcacacactctcacggtcaagcacagtcgctagctcacctggtaccgcatcaccaacgcgaacggactcgtatagttcgtataatacacctgggagtcggaaacacagcttaatcaaccggctcggcatgaacctagagcccgcatctgcatcttcactgagcgttcaggccgttgcagcacaccacgaaaaaccaggcataatcacccccagccgcaaagacggagtccctgtcgccgctctcagtgacgagacgccaataatccgaccaccaaaggtcaagccagaaccaccgaaatctcgacgctggcgcgggcgccgtatggccgtggatgaagacgagcaccactctgccggcacaagcagtgacaggaacaccatccccgaaggcatcgaagtcagtcccaccactgttatcactcccagcacaccaccaccaccacagacacatagcagtgatcgcgactcgggctcaggttccactctcacaacttcaggtccaccgcgacgatctgtatcaaaccctcccccggccctcccgccaccacgccgttccagccataacacaccatcctcaagtcaccaccggcccgtcccagcagcgggaacaagccgacatggtcaggctccacttccgccaaaagcgcgccgttggggacgtggcaaaccccagcatggacagagtgactcggtcgagagcggggccagcagtgttagtccatcgaaggagcgtgaaactgctgaaaataccaccgtgcttgctcagcaagagctgtcacagtcaccagagcgcagcgttctttcggatccgttctcgccaaagtctcccacactggtgatttcgccgatcgaggttactgcggacaagacagatatcccagccgacggtgctggcgacgaccatgtgcatctcagtgtagaggaggcggtgcagaatgtttccctgcagtgagcgttacttctcgatctgtttaattcctttctttttcattattagatatactttttggctcccttcaggttgttttttttggcatcaagcgcggctgttcgggtgaacagattgggacatggtaggctatgtctctagttattttgcatggcatggatatttgcgaggacgtcagcgaggaccggatcctagaataacacaatagagtctatttgctgacaagaatggagtagtttacaatagtaacatagttggtaaaagtacaatctatctatgtcccaccaagcaaagcttgcctcggtgaatgacttaagtatgggcctagccatatatactaagaatgaagacgcttaaatcttcaacccccagcttcgccccagcccaatagcagtattccacccaaacccagcacactgtccaatgccggtaatcttatcagcaagcgccttccgatcatcaaagcgacgctctacgaacgccgccgtctccacgagatccggcgtcgggtcacgggtcatgacaacctcagcactggcatagatagccgacacggccagacgacgcgtgtaccaagtagcatcaacagtgtcatcaccagaaagagtaaggatatccgaagcaagggcatgcagttccgtaagagagagggggatattagccaagagcgacatttgcgcgagagcctagatatagacatagattagcatcccaatccaattctaaatcatgtccttcttgatatatcccaggaaggaagggataagaaaggaaaaaaactcacatcctgccaaacatctctaacatccgcattcatcctcaacctctccaaaagcagtccccgcacccgctcctcaacagaaagctcatggacatccttccctttctccgccgcaatgcgccggaataacccgccctcctcgaccttcccgcgcagcagaccccgacgactagcaagccagaagaggatgaggtcgaattcgccgcgggggagcagctgcaccgagacgtcgaggaagccggcgtcccgcgcgccgagggttagtgccgtggctgagaagccgtgtgtggggacgtgggcgagcgcggaggttaggattgccgtttgggagtttgtgtatgagtggtctgggagccgggcgtggaggtctgagtggtagcttcggtggcggaattgtcggggttggtttgttcggggtgtgagttgcgtggtgcgggtgcttggtgtggtttggagagttgttgtgcttagtcctcgggtttggcggagggattgggccacggagggggcgaggacccttttggggagagcgcgggcgaggtaggacatggtttgagtgtgcttgggtggtgcaatggggagatacggagtagatgtgattgttggagatggattgggttggtccgtgcgttgtagtataagatcgagatggatctggtgtattgcagaatctacatatgtatagtattatacttgatgtctgtctattttgattgctatatatgtgtgtagactggacggtatacttgatttatatcgagctaatgattgagtctgattctcggcttcagacatatgtacattttgtatgggatatacatacagaagatacaagatgaaacttccgcagaccatctttcaaccataatattattgaacaacatcaaagtgggatcataactatatactaatagtatacctgtgatagcaatgagtccaactgtagcagacattgtacgtagattaagtatttagatctgccgaggacttgaatgcagcaaagcaaaccgaggagatacctcgaaatgaccaccgtacgtgacccagaaatatatatgtaaaccagaaaagatacgatgaaagaaagcgaaggcacataaacgaacggcgacaaggacaagtacgaccacgatggatacgaaagcccgggccgttagaccaactgctaagatacatacgattttcaaaggataaagactagcaaacctacgaaacacaagtggaagaagatgctcattccattttggaaacaattgatcagcccaaataggcactcgaaacccattttgcgaggacgaagccacgaaagaactgaaatgggaataagggaatcatgaacaagacattgcgaaaaaaaagccagacgcccccctgtcaaagaaagtgactaggtaaaacaaggacgaaagtgctttacatgatctggtcctgggtcagaccgacggtcgactcttggccttccatcatctcttcgggacctgggccagcgttcatgtacttcacgaaggtgatgcccaggggacgaccaccgtactggtagccggagaatttagctgtgagggaagaatattagtatatggattggcagtcacgatacaaatgcaacgtaccaattgcagtttcagcagtatcagcggtgtcaaattgaaccacaccagtaccgcgggagcggccgttaggctcgtactggatttcagcgcgctcgactttaccgatggtggagaacagatcaaccaggtcatcattacaagtagaccagggcaactaatcgaagttagcattccatatgttgcccatcgcgcatcccaaaactcacgttgcgaacatagatgacagcgctcttgtcaccgttggaagtggcataatcagtgaaagggttggggggtccggagggaacaggaggagcaccaccgtgctcaaacccaccggcaccggggaaaccaccgtggctaccaggggagccaccgaagccgccgcgtccagcgaagccaccgccaaagcctccgcgaccaccgaagcctccacgacccataggaccgccaaagccgccacgaccgccaaagccaccaccaaagccgccacgaccaccgaagccggggccaccaccagcgaaccggtcttcgcgaacttcaaggggacgaccctgccaatcgtatccgttgaactgcgcaatggcgttgcgcgcatcatcaggagactcaaaagcaacgataccggagcccttggggcgtccggtagggtcggtgtgcacatcggcacggatcacggcaccttgctgggctgtaatacggagtcccggtcaattcaccttacactagaaaaaagtaggaatccaagtccaaaaatccgcacttacctgctgaacggaacagatccttcaagtcttgccagccaacgttgaaaggaagctataccgaacggtcaacaaagcctgcagaacttagcataacgggggtaaaaagaggggacaaacgtttgagacataaatttggcggccaccgccaccagcaccaccctgggggcctccgaagccaccaccaccgaatccacctcgggcaccggggccgaaatcaccgcgtgggggaccaccaacgaaacggggctcggattcacggtcctggggaaaagtcagtactaatcgcaacaccaacaccatggaatctttgaagacatacctcacgaacataaacaaggcgacccatcaggctctggttgctgagcgtattcacggcgttttgtgcttggtccctggttgcatattccacaatcctagtatacatgtcagctagaacgtcaatttgaagaaagacaagaaagtactcacccgcatccctacaaatcaggacagccaaggtccacccgtcaaccctatacaaaccacgagaaagatcggggaaatagaaggaactagcccctctacatataagcgcccaccttcgacattccattaggaagaagcaaaacatctgcaaagagaacttctccagctgtaaaaaacaaggcgcaaccaggattagcttcgatcgttccaaaaaatcaccaaattccaatgcgcaatccctgctcaccctgtctcataaaatccttaagatgatgccacttgacatcatacgaaaggttgccgacatagacccggcggtcttgctgggacgaatcgcgaacggtctgcatcatattctccttggcggcacgatcctcgaatcgagcgggggtatatccactgcgtccaccgaaaggagagcctgatcctgggggtccggttgctgctccggaagcactcaagggagatctggaacggcgttcgggacggcggtattcctcacggtcaccacggctgcgggagcgactccggggggagtacgaacgacgggcgcgtcgggggggactgcgagaagagcggcgacggggtgagcgagacctctcacgctggatctggtcagacatgaacaaaaagtagatagcaacggcggtcgcaaaagcggggcaatattataacgtataaaattgatgaaaaagagatgggacggagcaaaagacgtgttcagacggcagtcgctatgtggaagtcgcaactccgaggggggtcgtctgcggcgtgggtcatgtgaccactagctctgggggagtttgtctcggatacactgaggacctccggagtaggagcttagggccactggcacagggtgtttgtgcacacatcacaattaattttcagaatcacataacgtgatagtaatgtgcttccgccttgtggcccactgatctccagatccggcagatatctgatcaagtagacatggcggttcccacccccgcactgaccacacgccagcgatagcgacctctggtatagagctgcgagccatgcgcacatattggaatgttttgtagagtcgctggggaagaggaagacaaaaaggaacacggggctcgcggcaaacttacttggtatggtcgatagacgtcggctgggcggatgaggctgtcagcggagaatctcaagaaaccaaaggataggaagaaataggaaaaggagaagaagcggggggaaatgaaagtaccaggcgtcaaggttcaacgcttggggggggggagacctgagaaggtgattggatgaagggctgaaattgaccggggacccttcgagtgtaccaggcagatgagagtaacaaacgagtaatacaaagatacgaaaaagcagagtgtaataatccagaggacgcgcgagaacgtacccatgattgcgggctcgatggagcgccgagatacgttgtacaaagacgaacgatgggagacgggggaggtgaaggtagaagggagcggaagaagtgttgttctttggattccggatcctacaaagactcttggggaaatatcatggagagaagaaaatacagaattctgatatgtacttgaacacctcgggcaaaacccgtcaccgccccggcatatagttaggacctggtgtatacagctatggagatatcacgggggaaggaacgaagctgttagggggtaatgtgaatatcaacccgctctttcattcctaaagaaatatcacaaactagactatgacttatgtactgcctagatatgtacatcaatgtagctcctgaccatacagaccagccttatcgttcttatcgctcctctcacctcctgcgcaccaacatacaccattggacatctgcactcatgactggctgcacggcgtatttaagttactaaattgccacggcctgtaacctttcggaagactgtatccattcaactggaccatgctcaaaggttatacatggaaaagttatttgcactatttaagccttctctgccgtttacctatagaactttatcaggactactaagagaactactagaaaagactaccatcaagcaaactgaatcatgggctgcaaacacaaacaactcttcgtatgcatctttaataagaaaaagaccccctcacttcaataaaaaacctcaaacaataagtcctaccgggaaacaaaacgaaagaaatgggtgctgagtacccagccttgggaatcaagaatcaatccgcggaacaataaacaaagacaaaaacatccattgcgccacaccctgtctgtaaaacgaacgccgatgcagcatgacttttatgctgtgcgagagactgatccggtgtggaaacagtcctaacgagaggaccaaaacgccttggaacggacgagttgtgtaaggggcgaggagtgggacatgtacagataaaagagaacatcaaagagaaatagaagaaatggggtaagaaagatggaggaacaaatgtggagatgaagatagaaagggtggggaccctatgctgccacattggtacgaggataacggcctggcatcttcatatccagagcaatggagttgtctgtattggaacgcagcagaattggaaccttggctacgctgtctgattcgagaccttggtggataggaccattcccaagaccaacggtctggatcttaggaaggtcgagttcgtgatcatctaccgaagtaggattggtatggttcgtaaattcagtcgcattggtgttggtgggcaccgtagagacactctcccgacgatcaatctgggcaggagccgactgatcgcgacggttagagataccgacacccgagacggcagcaagggaagcctgatctccatcggaccggatatcgcggtcatcccgattcgggggttccagctgctggctctgcctcttcttagccactgccacggacggtccgatccaatcaccgtagtagctatcgtgctggttactatcagggcgagacctttcatcggtcccgtcgttggatctgtagctttggtaggagttgcgtccgtcgccgctacctactggtcgcaagctgtcattaaaggcactagacccatcggggagggacccagcagcccctaacatatctctgccagcggagctatccccgctggaaggtgacaggggcgcttggaggtttcggtcaagttggacgtcgctggggaacgcgcctccagcctggcgagaggaggtggggcggtcgtgagtcatgaccgcagactccgcggcgtatggagtgcgatcggcttcgtcgtcctccatcacctcattcaccgacctgccactcacgctgcggacatgctgccggacaaaggcgtttcgcgcctctcctgtcatgccaatcaagccttcgatatcttcataccaggacatcatggtctcgtgggattcggcgcggaagacccacgagtggcctcggtgcattgcgccagtctgtcgacccttcagcataaacttatgggagcttgagtcttcctgtgagtgggagccgagtttctgctctggaagatagagagacatgacaggcgtctgccatgctacacgatctgccgacttgaactcgtgaagatgtgttggcgacaacacatacctagagttgattagataatggcttcaaaccgcacggtaaagaagataggtactcaccagccaggagtataactcttgagatacttgctcttacgctccaacataccagctcggacttcagctgctgctggatgatccttgccagggtatgtgatgctttctacatcccggagaggaatccgaggatcgacaagttcttctgtgtcggcaacaaactggttccactcgaaatcttggggcatggagatcggacccgcctggagcttctcaacggtatcaagagcttcattggcttcgcgtcggaggatactagcgtacgcattgtatgccttctggatctcgctcacgacaatcccctctagttcacgaccagagttctctagattcaagaatgcctatagaagcaacattagacaggctactaggatagacaaagttatcacaaacccgatgcaagtagttctcctcctcgatctgtttctcgacctgcttctccacgcccaggcgcaggatgaatggatcacctttgcccgatgtcgcagaggcatcggtatcgacaagcccaagagcctcttgcaagttccgtacggctttgcgtgtgccgtcaacctccttgtcgacggtattcttgaaatcagccgagagactcttgatctccttagtcttcttctgaagatcactgcggagaccagtcaattggctgatcacctcgacctccacctcgacagctttattggcctcggtataaccctggcggtggaaattctggaggatctccgtcgcatcagccagaccacctggctgaagcaggcccggtggaagagtctggttattaacaacgctcgaagcagataggaacagctttgctctagtttcgtaggatttctgcacctccttaaaaaagagaatcaagtccttcagaagcttgcgccaagctacaaatcctagttagcaaagtctccctagcccgcgcattgacaagagtaaaagcccacctccaaaccgattcgccagcacctcggtcgggttcccattagtagggaccggagtcaggaaagcactattgacatcctccgcgccatcggcgtgatacttttcgcgatcgcccaagctcagactcctcacactgccggcgcgcatgctcctccggctcccactgcgccgcaagctccccttcttactcagcgaggccttcttccgcaaggtgctcgaccgggacgggctcgaggattgcacgtgcgacatggtggagacagagcgctgcactccagggcgatcgaacgccgagctgcggtggctgacggtatcaaagtcctccttgaaacgggggttgtggggaacctgcgacgactcgagggcgccggagctgtactggtatgctgacgtgccggcgaatgaattcggtcgcgacagagtcgagcgcgggccgtacccgcgactcaaagccccggggtcaatttgcgggaccatgtatgcatcctgtgagggcgtctgtggccgcgcggccatcgccatatctgcgggaacgtgggatattatggtttatgcaggtgtctcaggatagggagcgaagcagaggatcgaaatttggccgaaagttggaagtaaaaaattaaagaaagggaaaaaatgggataatcaggataatcaggataatagctccaagagtttacaggcctaaagtggcgtcgtttctggttacctggcgaacggagcaattgtatgcgggggaggtactggcagcatgagattcgccccactcggttggaaaaaaaaaggagaagatcaagagattgggctgccgacatagggcagagctggggaattaaagggaaaggaaattctgacgatgacgtctacgagatgcaagatggtgacgaccttggaagaaactaggctttcgggacgaccgggagaaaagagagggggaaaaagccatttgacttctcgttctctatatcttcgtggttgacgtactggatcggaattcaaagccgtctttacagtgtttccattcattctggttcctatactgtaaatagcaacgggggacttgtatacttcccttttatatggctgcctgtacgagaagtggctgagggactccgcccctgaacagaacgagcaagactattggaataagattattattgcgatcctctcgtgcacaagatccactcgatctgtggctcatacaatataggagaagaaaaataaagggggcgaggcacccttcccctgatcatctagtgatgaacagtgcatgacgtttggatctggggagaaggacagatcaagggcagcgactttgacatgttctccccggctcattcggaatactacatcttcacctgggtactgtcgagactttcttatctggctgttacatattgtgagtggatttcgtccgggccccgaggtcgagagtgggctgttgcttggcatcacgtgcgatgtatgcacgtcaggtgatatataaggttccaatatccagaggtacaatataacacagaactcaatgtcatatggtaaggaacaaggtacgatagtttattcgagagtgcagatatccattatacgctctcaactggatggattcatatttattagtgaataaagagacaactagtatacaagataaagcgccaagctaaattttcattttatgtaaaccatgacgcacagaaaatcgacatcgaggtaactccgaggccggctctaatttagcaatactaagctaggaaaatactgagatgtatttctcatatttaagattcattgagatttgagcagctaataataacagtttaagtattaccctaggttcaagactgtaattccaactgaagtcctccagattgactacatagattagatggtgctcgcagaaaaagtgggtaaagttcccccccggccgagaaaatgtggcgctcgacatcatatgagccatttgggcaaaatcaaatgccaaagctcaccaaataggcgtataagacagttgcttcttcgattcatttcgttctattgaactgatgcaaaattacctattctgaagacagtacggagtagatgaattgagaattacaattgcacgtactctgtacatagttcaagcatggtaattatgctcgaaggtgacctggatatactgattgacatattctgtacaaagccacgattcattatgatcttatactacatttgtcccttttagcctggaaacatactcgaagtcctccacttgtttgatatacctgcactgtcattggctcccgggtggtccggggataccccctcattttagagtattattattgaacaccagagtggtacatccatggatatctacttctagattcctccgtaatacttcttgagttccatgcgattgatcctacgggtcttgtagtctagatttgattgaggggcctggactagctactacactggtagtcacttccagcaagtatacccagaactgctcaattgttggtccaatcttgaatgtgtattgttttgaatttcctggagactaaagaaaaccaaatcggatgggattgtccgtacggtaggcagcgtgatatggggggataatttacacaaagcaatggaaaaaggcggacggcggactgggaagaatgtaggcttatgatgcaggaactggggatgtgggaacctcaatgccgtaattcgccttgagacgctcccggcgtctctcttcgtagccggggccgtagatacctagtggagtcagtatcggtagacaatgtcgctacccggataagaagcacataccacgtccttcacccaactccttgatggtctgctctgcggaagtctggaatgccgtgcgcaacgctgtccggcgatcgaactcgtccacggatggatctgactggtatccaaacagggtgccaccggtgtactcgaaggcggccatggcggtggaaagggcgacaccatatccgagcacagcggggagtgtgcggactgaggtaaacccgattagctccaagtacataaccatatactcaattcacttcgagaacttacctcggagaccgagaatggcaccggagaagaagccacccagagcgacgttgtagtggtcctccttctcacgcaggttggcggaagcgctcttaatgaactcataggtaccacccatggccgctttaacatgtctaatttagccattgctccatcacttataggtaaaaaagcccataccaaaggtagtaatgatgccaccgccacggacgaagacacccagagttccgacgttctgtttggtgagcgtgttctgcacagcggctgcgaagagaccgacggttccggtcagcgcggtggccttcagggctgccgaaatggcatccttggggtgataggtgttatcttcttcgtcgtggtgcgccatggtgtgtgtgctgatagcagggatggactgcttgcggtatgagatgtggttggcgataggattttggaagtcggctttctgccatacctgaccgccaccgcccacccaacggagctctacatggttatgttgatgcctctttcatattgaacattttgattcatttgctatcatcgggaatccccttagatactgcttactgccttctaagagtgggtcttgatctcaaaactgtcaagttcgtggaggagagagttccaaagcttgccagtgcttgctgccaagtgcagtgggctccccgcataccatacagtggcgatttcatcatttgacaatattgtcatcacagctgagctgttgcattgcgtgcttttctgagcttcgatgagaattaacctttgagaagaatcatatagcatcaaagcgcatattcaaactgcgtgaggcctacaggcccgaacacagtacttcatggcgtctgtacagaaggccggtaagagctcggaccagcaaacccggaatataactcgagcgaatgcttacaatattttctatcaatcatacaggaaagactgcgccacgtctcatttatgatgtccagctgtatgacccagcacacgatccagacacaggccgtaatctcctctcagaaactccacccatttatccacaaggctacaaaggcttacctggattcatatcaccagaagcatgtcgacacgaatatgccttgaaagaagaccagaccttcatgtcagaggcagagcaccggagaaggcctggtacttcgtccaaggtctcagccatatgcacaaagtgtcgttttcatcttcaagtggtggtcaactacaccagccatatgggcgcattcggtcagaaccaggggaaacacttgcatcatttggtctacaaatcaggacggcagaagcatggccttgcgctaccagaagaaactcccaaggggcagatcgcggagacgtatcactaccaatgttcctacatctcatgctcagctatggtgtctttgcgaattctttcaccgattttgagcccggaattcatccgcttgatgaccgatagagagttattgcggaaacgagcccaagaggccactgcagcgtatgctgagtccatggaaggcatgggtgatccgcagccgatcaatgtattggataatctgcgtctgtacattaccaatgccctacgaaacccacaacgcagcaagcccatttcctctgtcaataagaggttcatgcactctttcggcgtggaaggtgctccttgtaaagaattacttgaatttcttgagtttgtgtatgataaggtttgttatcaagatattgttttctcatatcgttcactgttgttgttttcgctgacgaattgactcaggataccggggcatggcacccacccaaaccgacctctgtcgccgaaaaaccttaccaagacacattgcgtctctttctcgacgacttgctgcatgaattactggtcttgatatatcatagaccagcctcggaaagaaaaggaagccagattcccgatcttccttcttctgccatccccgttatttcctgcgctctagaagcgcaagactgtgtgtacattgtgccccttggccctagaaaatccgaactaattcccgctccagatccgaaagctattcgttataaggagtttgaaatggctcatgctccgttcgtacaccctatattcaaattgataggactggatctgatacatgtttctttagtttctatgaagacctgggggtgatggaggatatgtcctcgtcgactgtggtcgaagcatacaatcgacagatctcagtcgatcctggcagaacctcgctgtacttgtctgctctcaacgctgtcggctttctgcgtggtgccgaagacaaggaaatcattgacatagccgtccagggagcatatgaacaagggaagtacaccgttgaggatgtcgtcgtcgcgtatcaatacttcaatctccacttcgatgatccaaacctcactgatgacagcatcattggcaaattctatgccttcctcagctctacaacgcaagagactgaagcacgtcagcagttgtggcgaattggcgactctaggggaagtgcgcgtattaaagcggcatcagaagagcgtgtgttgaccaagtcatgtcatttctagactttaatgtgtgctaattttgacaataggtgtttctaccgttgaacaagcgaatgtcttcttgggggttgaggatcagaccccagatgatttcgtcatgaccatgtacaccgcaaaggtatgtttctcgatcgcttcatttgtgagtcggacgccagctaatattgttataaattaggtcaatgacaacccacttaccaaagaactggcgaaacgcgccgtggcactcattgccgagtcccgcaaatcggtcgcattgaatcacttcatcaataccggagagatgattgctggtgaaatggacattggtgatgcctatcgtctactccaaatccctgatcgaactgtcgacgatggggcaatcatagccgcatatactatctgcatcgatgaaaacccaggggatgccgagagatacaatcaagctctgacgatcattgccaagcaactggacagctcgacgttgaggaatatggcaggtatctccaatgagcctgacagaagcatgaaagattggccagtcggactacagaacatcggcaatacatgctatttgaacagcctgttgcagttctacttctccgtccgtcctttccgtgagttggtcttggattttgaacgcttccaggtggatttgaatgacgaggaaaacctcgcaaataaacaagtgggatcacgaaaggtgacgaagaaggaggtcgagcgatctcagcgatgtaagttactttgtcagtgccgatggctatatgtctcaaactgaccctgtcctttgcagtcctcaatgagctccggactttgtttcgtagcatgatcacctcatctcagatatcggtttctcccggccaggaacttgctcggttgaccctgattagcccaagcaatgaggcggcaatgcgtcgtcgatcgacgataactgctactagatccgatattcttggtgaaatcaacggtgctcctgttctagggccccttgggcctccgcagtcccttctcggtgggcagatggagcccgcttcatcttctgtccaaactgatcccgtacctattcgaaacgcgaccgccagcgataacggaagcgatataacattggtctcggataacagcatggacgatgcacctggactctttattgaagacaaggagaacaaccccccagacttggaccaaatgtcggatcaagcagaagcaggatctccccaggacatgaatctcgacctagacgacagtgcatcggaaatactaccaccccccgtccctcctcgcaacctccctcaagttgatcgggaaaaacaattgaaggaggaggtggaaattggtgcccaacaggatgtgacagaagtcatcaacaacgttctgttccaaagccagtgcgccatcaagcctcgaggcattggcagtgacggtgaacagcttgaccaggtcaaagagtaagtcatgacagccgtacacgattgtacctattttaaccctctcatcagcttgttctacggccaaacccgctcttacatctccaccgataaaggcacacgttcgaaggacgaacgatggtgtgacatcaaggttgatgttgctcacggatctagaaacatctacgatgccatcgatggggcatttgatattcaaaagatcagcgtggaaaactctgtggccgagcaattcgcttccatcagccagcttccgcctgttctccagatccaggtgcaacgggttcagtttgatcctgtgaagaaatgttcgttcaaatctacaaaccatctcgggttgcttgaaacgatctacatggatcgatacatggacaccaaaaatccagatgttgtggatcgacgaactcaatgctgggagtggaaggcgtctctgaagaggctcgaggctcgccgagaagagcttctcaggacaaaggtatcgaatattctcagtcaatgtctacacggctaacatttttcttttccgtaggagggcaccggtgtcgatgttgcaacattgttccgtagagttaaaaccgcacttcaagatgtgaactccattgagaacgacgttgagaacgacaacgaaaacgacgttgagaacgacaatgagaacggcattgagaccggcaatgagaacgacactgaggccggagcggagttcaggtccgactccatgaatgctgtggctagcacggagttactggaaggtctcgagtctcttgcccacaaggcagagaccgacctgcgaggtaagagttctggcgttgctacttcctttgaaacagacgtgttgactctttttgtagctgtcgaccaagaaatccaggatacgcagaccatgatttccagccaatttgccgatttccataacctcccatatcgactgtatgccgtttttgtgcatcatggctcagtctcattcggccattactatatctacatcttcgactttgacaagaagatatggcgcaaatacaatgacgaatacgtcaccgaagtccagaacgtggatgagatcttcaagaacgactcgaccagcaaccctccgaccccgtatttccttgtttatgtcaacgatagcatgaaagaccgtttggcaaatccggtctgccgtgaggtatctgacatgtccgactttgccggtctggaacaaaccacctccatggagggtgttcagcctaccagccctgcgccagacgtgaatatggaacccccatcctatgaggaagcggcaggcatcaatggaactccaggtacgggaaacacagtatccgacccggagaccacaacatgacctcgtccggcgactgactcggagcagtcttggtagattccaatgccgcgcccctcgattcggccgctgtcaaccctctaaaacgcaagagtgttgacgaaatgaaatcgatccgtccgacttaatttcttactgtgtggcacagcaccttggacagcatgataacatgattgcatgaattctattctcgattatcttatgtctgcacgtggatattactgcattgcgaggtgtgaaatgtttttgttatccagcatgtacataggctgaagataccatggagtacttttagagtaagatagtcgaattgatctttctctctattattgatcttctacggagtacgctccgtactccgtcctgctcctttaattggttgttgtcccgggtaaaccttggaaaacatcaggtgaccatattattaagctgacttagcactcccgatttccacaagccgcggccgcggtaatcggatacggatcggctgtgatttcggcagcggcgaaaggaagtcgatccgccgatggaggttccgaagataatgagtatcaaaaaaagaatgcgatgtgtgtatgattttgcagtaatttctctgggatatttctaatagttagtcaataagttcagaggctccgggggttaaatgtattgaaatcggggcggttcatagtaggcgggagagagccgggaatccacatttccggggaaacgaatatcactcgggtacgataccgctcacactgccgtgcgggaatataagaagtggctattgccgctaccacaggcgtttgatctttttacaccttgatgtggacttgggattctttagtataatctctcatctaaaagtcgttcactatgccttcccaagtggcaacatgtttgcgcctcgcgcgtcagttctccaaccctgcccaggtaagtgatctgccctatagttctttttgagtcgtggagactgacaatgtcttgccttttaccagcaccaacgtttcattgcccgcgcattctctagcagtgtccgccgcagtgatattaacaaggtgtacccctccgccgaggcggcagtcaaggacatgaagtctggcacgactctgctcgctggtggattcgggttgtgtggtgtgcctgacacgctgattgacgctgtcctgaagaacccctctatcaatgacttgactgtggtcagtaacaacgctggtattgacggagctggtctcggtctgctcctcgagtccaagcagatctcgaagatgattgcttcttacgttggtgagaacaagaccttcgagagaatgtatgtcactggtcagatcgacttggagctcagcccccagggaactctcgctgagcgctgccgtgccggtggtgcgggtatccccgcattctacacacctgccgcctttggtaccgtggtgcagttcggtcaggtgcccctgcgacacaaccccgacggcacagtcgcaaagtacagcgagccccgcgacaccaaggtgtttgatggcaagagctacatcatggaggaggcaatcaaggctgactacgctttcgtcaaggcatggaaggccgacagacttggtaactgcttgttccgccacacagccaacaacttcaacggcgccatgggccgtaacgccaagatgaccatcgttgaggctgagcacatcgtcgagcccggcgagattgatcccgctgccgtccacttgcccggtatctacgtcaagcgtgtcatccagagcactttccccacgcagattgagaagtacacctacgccaaggaggagggtgctgacaccgctgctcttggtaagggtgagaccgccaacaagcgcgagcgtattgtccgccgtgccgctaaggagttcaagaacggcatgtacgccaacctcggtattggtatgcccgtccttgcttccaacttcgtcgacccctccatcgaggttgtcctgcagtccgagaacggtgttctcggtctcggcccttaccccaagaagggtgaggaggatcccgatgtcatcaacgccggcaaggagactgtcactctcaaggccggtgccagctgcttcggcagtgacgagtccttcgctatgatccgcgccggtcgtgtcgacatgaccgtccttggtgccatgcaggtcagcgccaagggtgacttggccaactgtacgttttcccgcaattccttcgtttatgcatataactaacattttctcacagggatggtccccggtaagattaagggcttcggcggtgccatggacttggtctccaacccctccgccacccgggtcgtcgtgaccatggagcacaccgacaagaagggtaaccccaagattgtcaagacctgcgagttccctctcactggccctgcctgcgtcagccgtatcatcaccgagctcggtgtcttcgacgttgacactaccagcggcctgactcttattgagatcgccgacggtgtcaccgtcgacgagatcaaggccaagaccgatgctcccttcaaggtcgccgacgacctgaagcccatgctgtaaattcgcatgcacactgtacgattctttaagcgttttgtatatagacattaggagttagattgtttcaaattaaggacatatcctggatatgcatcaagaggagcattgctctgacaaaaattcatacattcgagtagaaaggatagtactagttgtacaataaacaaaaaaagagcaaaggtattggtacatgtcatgcaacccatcatataaaaaaccccataatgctgacccaaatccagtgagacaataatacatcaagttttcccaagtgtttccaagttttccaacgtcaaagaaccaaaagtctatacataacagcaagaagaaaagcatcacgtcaagcggataataccagccagtctcttccgtaaccggccaaaccaatcgcggttcggtgcctctgcgaactcacggatgacattgtcatagtggtctgggttactagctggccggcgcagcttctccggcatgggatatttacgcgcgtagcggttattcagcagcgattcaagtgcattaacggaggactcggaaattgctgggccggacttgtctgcggacttgagacgggattcgatataggcttggacggagactgaagccgggcggactgcgtcggaaggccaatgcttgaggatgtgggtgaggcgactttggagggagcgcgggttgagggcctggatgatttgttaggagatttgtttgggattgagcatcggggggcttttcgatggtgttgggataattcagatgttgggtaagatactcacaggtgctttggccatggtggacaagcgatatcacacgataattgtggtctaggggaaggatcttcctcatggaagttgaggcaaagaccggaacagtctattttggcctggcgcatcaggcatcaacagccacatccattcctgttgccttctcgtcgaccccgtcattttgccatccccttgtactctcattatatcatttttttcttttcgccctaagttattcctgtctcaatttcctttctgattctattcagggtcgcttcccgctcagctcgccatgagctcgcagcgctattcacgggtacccaatccccctccccgctgatcccctatcagaacaagccccttggatgggatccctcggcaacatactgaccgcgactgtctaggtgaatgcccaggatgaagaggaaggaccacattcctatccgctgaacgcgcgacctgaacatagcaactcttcaccttcgtctttccgttccggatcccgctcgtcgtcacgatcgtcaaggcggctattacaccacgatccgcaacacgacgatgacgaacagacactcgccgatgcttttggcgacgaagacgggtccgatgatgataatgagccggatgaccgacagcgcttgatgcgagcagactccgacttccgtgctcccccggataacggccctaccaccacggcctcttcgtcggactcgagaggcgatccgcaggatcagattcaatcagggcttctcaggcgaccgacgctattaccaagttttacgaccccggcttcgggagggagtcggcagatcgcctcatcgaatgatggagtctttgccaatcttgctgccaagcctgaacggggtgagaagaatgatgatcttcctcctgtaagttgatcattgatatttttgacccaaaaagaaagacttatttactgatatcttatagtcatacgaagaagccgcagctgatgcgacaccgccatattgggagaccaccattgtagctcctggtatctcgtcagacgaggtctatgtcgatggattgcctgttggatctgttttctcatttatttggaacgccatgatttcaatgtcattccagctcgttggcttcttgctgacctatcttcttcacaccacccatgccgcaaagaacggcagccgagcgggtctcggtcttactcttgttcaatacggcttctacatgaaaggtggcagcagcgacagttccggctccgagggtggaggctccgaatatgtccctccacctgaccccaacagccacaacttcgaccctaattcggttggtgagggtgggggtaatggagggaacggcgccatctctggcatcagcaccagtgaatggatttcatatattcttatgattgttggctggttcatcttaatccgtgcggtcagtgatttcctgcgggcacgacgtcatgaacagcttgttttgcagagcccggatcgtggcttgggtgtaccagtcattgcagagggcgaacgatccgagactgttgtctaatatcgatatacggattctcacttgaatcaattttttttttgggacgtggacatggacatggacatggaaatgtctggcgttgcagcatggagtttcttattgtatcgacaccccctaggagtactgcctccggattgcattccttcaatttttcctttcactttatcacaccattttatctttgtctctgaccgtgtagctattctgaagataccaaatatatgaacaatgaaccatagcagttatatttatgtagtgatgtcaaccctaagtcgagtctcctagaattccactaaccacttcatcagcttctatgatcatcgcactgtttcctcattcaagattccttctagagtgaaatatcccgcagcgccacccattctctctcggctacaggtccgtcttatcattttatgccgcggcctagtgcccccagtcatagtgcgcctactacagtgcccagcacccacctactatgcgctctcagttgataggacaatggtccctcgttgaacggaatacctatataggatataccttgcctttacacctagtagcgcatccgagaaaacgtagaagcggagaaagtactcatcgctgctccagtatggtggtcttccgcactcggatcaggcacaccgtccagtcgcaccaggcctcgggtatatcatgcgcgtgcaaagcgtcgagggcgaagtgaggatctcttgatgacgaagacgtggcgacggctgtctaaaaaaagaaaggcgctctcagagcgcgtgcgcaggagtcacagaggtggctgtttcgtctggcgttggaaccgaggaaaggttgttagggttagaagggcttagattgggcgcaaaatataaatatggatgttgctgtaacatagtcgtcatggatgaggtggaagttagtggaaagtgcggctttcggtgaatttctttcagtcacggggggtcttcgggggattgacagccattcatagccccaacagcggtaatttccagcgtcaattgtattggcgaccgcagattccatctatattgtaggttgttacaatagatagtagatcccaacgtaatcgcagcccaagggttgctgcccgcgcatactgcgccacgataggcagcattctatatccttgtcctttgcccttgcattcctttgtttctcgcctgtgtaacttcaccccattggatgaacagaaaggagcgcagaaaagaagagaaaacagaaaacaccaggcccttcttcctcggcggcatgaccaactccgcccactgccgagagacccattgtttatttgttaacctcaaccccaacataaccccagtctttctataattcacctgcgttccttgtcggggtggatcgcgggcttgtccgcaatgtctaccatccctcagggccccgttgaggcacgatcactgtcgtcggttaccactatcgcatcaaatccccccgcctatccgcgcaatcctacccacgagaagcacgaaccactctctctgtacattgtgcgtgtgccaggaagcaaaggtatgagtcaatcccatattgagactatgctctctttcttttggtcttcaaagccccatagttgcgcgttaccgtgctttaacaaccccccaaaaaataaaccataactaactgctatttatatgtgcagacatctttctctcgcctctcaaaccaccgactaagtctagtgtctctgctgaggcgatcaacgcctctctttactatctccatgtcgcgactcccgacgatgataccctgctccaggaagtagaagaagagcgcgcagaggaggcccaattgcgaaaggaacgccttgagaaagcgggcggcgatagccctgtacaacacgagttcgcgcggctgaacaatgtgcgccggaaaccagttggtggaggaggtgatcccaaccccgagcgctcgccaacaacgcctcagcaagatgccactgccttgccatcacgtccgatccctgtgttgcaggataaacctgcctctcctgccttgccaccacgtccggcctttatgccgcatgctgctgcttcgccgaccttaccaccacggccaatctctatgccacatgccgctgcttctcccaccttgcctccacggccaatccccatgccgcaggttactgcggaaaatgtatctttctctggaactccagtggctaatatacatatgtctggaggtgtatcaggagagtctggtggtaagagcggtattcggtggcgacctttaccttccttgccgcctggtgaagagtcatgggccaattctccagcaggcgaggacccgtctaagaggacatcccgatggagcgcgtttgccgaacaattgcagagtcgaggagagaactggaaggaaaagtatgaggcaaagtacgaggcgctgtcggctggccgtcatagccttgactctactagaccacaattgcggccgcgttcctcgcataaccgtcccggatcaccattaggaagtccgggacaatctcccaaccgccatagaaactcaaatggaaaccctcctagcaatgctggctttcatatcacgctcatccgacgcgatcccacgtccggtacacaatggaatgtggcaactatatcaaccccacgaatggaccgcaataccgtcgatatcgagatctccacgccggggtataacaggttcgcaggctccaatgagttgccttcattatccaacctagcggtcaatattccgacagggattggacgcctacccaactctgccattcctcaaaccttagccaccgagcagtcaaaggagcagtcaaccggcccacgaaaattccgccgccagctctgcgtatcgaagccattcgacgactccgctgccacggatctcagcaacggccttaaccaagatggtccatcctccaagctaaaaagcggctactacgtcttcacgtctccttggaatggcacatgtaccttcacaaccagcgtgaacggccgaagcctcaagtgcaaacacatgatcccaacacccggcggcttcatccctacaaacggtgaaacagaagcaccccccgccgtaactgtcgccgagctccgcttcaacacccccttccaagcagcaaacctccactcgcacgcccaccacgcagtccacaaaccgcacccgaaccacatttcccccttcacccaaagccaacttcaaaccccgaccatcccccgggcaaacgactacccaaacgacaacaactcctacgaagaatccctccatccatccatctccaacaacagccacgcagccgcaaagcgcaatcctctcacccaacttctcaacccaaacacctacacccggccgcgcgcacactcaggcccaggcccaaatatcccacctctcccggcctcgcccccagcagactcacgtccaaatttcagcccttcaaccatcctccgcagaacctccatgcatgcgcaccgcttcgcgcgccatagtcagcatcattctacttctcagtcgcattcgcaccgcagtacgagtaatagcagtggcggggatttagatcacgagtctgatgaggatcgcttggacttttcgcttgcgagggagcctgctggtggtgggttaagggggaagagtgccaaactggggaagttggttattgaggatgagggcattaaaatgctggatttggttgttgcggcttgtatggctgtttggtggcgggggtattattattgagatatattgatcttttttgatataagatatcctggcttggtctctagggcgagtctgctggctatagtcggttagttttgctatgatagcgtatatgaatatatgaattccattttgtctggtctaattatccctttgtctgatatatgctatttccaaggcttgcgatgatcgcttgcgcagcggtacgaagttcactgaatcacttgtctgtatcatgtatcgcaccaatcggcggaggtatctctatctccccaagctacaagatggcctcctatatgtagcctggccttagaaggtgctagtatggcaagtttgaacttctgtagttttgcctatcaagggttatacgtagagaagttttccacatttttctgctgtctatctataatacttaagaagggcaagaatatgcctatcaaaaaagatcaaaaggacacaaagaagacctcaatcgagccaactagatcatgtcgttcttaacgatagaggcaagcgcggtcgacgtgataattaactaggattttcacatatgagtaacagcccacatgtaattcagtactgcaggtcctagactgtaggtctacaggttccagggttagtgagcacattgcatagccctaactagtactccctactccgcagatgtcaagtaaataaaaagtggattcgtcgacaacgccattcgaaacccaaccgtcagccttacagcataggcacatgacttcccaaaagcgtaggaccaatcacgttacactacaaaggcccacatcccatctccataacgaaggacctgtaaaagagaaaaaaaataggtagcttctctttgattgagcgtgtcatccttagtgcaggggccatgctaatcttctctgtatattttcatttgaccatatgccccaaagggcgaagtatctatgcgttcagttcactataacctccatttgggggcagaacgttaccgcctacctgttttggtgtgtatcgggcgattaggcacgtggcttggcacgtggactttcccgaacgggaaactatgctccatagttagaggtggaagcttggatttgataaagagaaatcgggtgattagctagcaactgtcacatacagagtagtactatgtacaaaggccaatgatatgtttgagctacgtgttctaaatggttcctcattgacagacagcagacgaggggggagagttgattgacaatctatctaatgatcctacttgaaagagatgcaatgcaccgagtaatgacatagacagagacccaagtatcatatccagaaaccacaaccaatggcgccttgaaatttggaagtagtcaaaggagtcagacatgaacagaaggttataccaaaataaataccaaacgcagacacaatccaagctataacatcgggcgagagggcagaccgcagaacctcaaatagagatgagaaagtcgagttcgaaatcgcagttataatgatgaaaaaaggacccccatgtaaatcgtcccagtcttttttgtttctctgatggtatctcttggctaaattagatcaacatgcagggcgcggtagaagacacgatcggatttcaacacgccgaacaaccaacaagtcagaaagaagaaaataggtatcaacggtgatgcacgtccatgccgcgctgcagcgaggattccaagtcattagggttgtagccaccgccagcggtagcctcctgaggtctaggatcctcggtcttccaaggaccctgttggttatctggaatggggatgttagtctgctgagcgacctgctgctgctgggcggcgtgggcctgcgattgctggcggacggtcgcacggaagcggatgacctcgtcgagaatcatcttacgcatgtcgggaacttcctcgacgacctcgaagtggaagtcgaaggtcgtggggcagttcggctcgtcggaggcgtcgtgccagatatgcaggtaggggtgctcgagggcctcctcgacagagatacgagacgatggatcgaacgctagcatgcggtccaacaggtccaacgcatcggggttggcttgagggaacagctgcttgaaggccactttcggcatgaagggcaggttgcgcacgtattcctgggcgcggggcgatccaatgcgcgccagggtctcttcgttaggtgtacccaggtagtgcaagatctgattcagctggtcgacatagtcacggcccttgaagaagggtcggccgccgaggagctcggcgaggatgcagcccacggaccagacgtcaactgcacaagtggggttagcggggattcggtggcaaattatgcatgccggtgttacatactcgctttggtatagctctggaagctcagcatgatctccggtgcgcggtaccatctcgtcgcgacatattcagtcatgtatcccgcgttctcctccgggtcgattgagaacccacgggccaggccgaaatcacagatcttgagctcgcagtccgcattgaccagcagattaccgggtttgagatcacgatgcaggacgttggccgagtggatgtacttgagaccacagaggatctggtagatgaaggattggaagtgggcgtcagtcaaaggctggccggagcggatgatagcagccagatcacattccatcaattctgcaggcttatcagtccagctctattcgtcgcaaagcagcagaccacgtaccctcatagagatatgtttcgttgaagttgtccggtcggggaatatccatatcgtacaggcatgtaatctagagggctgagttagcgcgtacaggtaatgataaggatgatctgcggcctacattgcgatggccacggaaatgctgaagcagcttaatttcacggagggcgcgcttggccagaatcttcttgctgaagacattggtcaccttcttgacggcgacaccttcgccggtctggatgttggtagccgcgctgcattatgccatcagcacgtgtccaacgagtatcatccactggcatcaagacctaccacacgataccataggctccctggccaagctcctttgtcacattgtattgctcgctcacgataaagtcctggttgaagaccttgaagaccttgcgaccttgtaaatcagccatggtgggatgtcgcgtcggagagtcgtagagtgttagaaggaaggcaaggcgacgaaggaaaatggaattggcgagggtccaaggtgtcttcaaaaacaaaaagagagaagttgaaggggaaaaaaagggtgaagagtcgagagaagtgtgatgagtttcagccccgcagtccccgcgggtgatccgccacgcaaaagcgtttaagtccactatcgctctgaatgaatttgaagtttcaaagaagttctaaatttaattaggaccgaaagacctactgtggaagacttggaattcttgaatatccaaagattaattcatttcgccgtcgaaagagtgaaatagagtctattcctttgtataccgtctccatacagactacatatctgcgtcctcgaaagcaaatcgaacaaagacttggaaagcgtggctgaaacatgtctttgaacattttctatgacgtctctaaggttctacaggaaccagtctaaaccttttagggctacgaagaattcattcgaaagaaataggtgtattaaaggatatacacaaaggacgacagacatctcaggagagctttatccttttgcttgcagggagggaaaagttcaaccgttgctgtctcttgccagggaatagcgtcttcaatgtcgacgcctgccagtaaacccgcctgctggggggtttacagaggtcgacgaacagtctcgccagcaaggctaattgctgggcgtccaccagtgcgcggtggttacgccctgctagaggatgagtatctccgaagagcaaagcaaacaccaaaggtagcttgagaggaaatgtcctgcctttgaagcaggtacgaccaagcacccgcctcacgttggtgtggaactcttgaaggagcaagcagacattctcatctccggggagaacacagccaagaccttcttgccgcagccattgtcttaaatacgacaggtcgaaggaccatgacctccaagacaggaaaaagggttggttggagataccgactccttggggtttttcaacgacctgctttacacgaaggcggccatccgacgtaagatactttttgaccttctcttcatacgacatttgcaaatgagctagaggtacagggctcgacgaggaaggcgcgatgactccgtcactttatctggcgatacaattgagtactcctttcccttcgatatcagcgaggccaatttcgagcacctctttggaagtgaaaccaaattctaggtcgatattcaccaaataggaaggagggatattggactcgctgtcagattccatcctcctgatgaggttcaccattatttctgtctcgggacgccactgctgagaagacgctgtatcgaacaaagtcctaagctccttcattgcggcttcatcgtagacgaggagttctagcgtccagcaaagaaagtgttcacggcaaagtcttgagccctcccacgtaaggctgaagcacctcttatggcagcacaatgattgcttatcgcctgcctccagaaaattggatctcaaaaactcgttaaacacaaaccgcccattgcagggtcggcatttgagcccaatatgctttctttgatgatctttgtaaaaaaacacctgtttggaacgtgattctcgtgctatttgagcacggaataccaagcactaatccctcaacgacccttcccggccccgggcacttaaggccgaggtgaagaaggcattcagaccgagcagctaaattatgagaattagcaatgggatatgaggtagtaatatcttgtatgtcttactttttctgagtctgtcttggtctttttgcggatcgtccttctgcgtatctttcaacctcctggctgcccacttcgtggtcgcttcatgctcggaatcctcaacttagtcgtcggatccactttccaactcttcctcttctccgtcctcttcatcattatcaactttgtcgttcgcggcttcactctcacaatcttcgtctctgggttcattctcggcttcaagattcgcaccggggacctgtttttctcatgagtaatgctcatttgttctttcgttgttacataccttcaaaggtttgcattccccctcttgaaagtgtcctcgttgaacatgcttcttataatgggctgaggcggcaacctgtgtctgcttcctaccttgtatttgagaaaagcatcggtcgaactggcacagccacctgggcttgggataatgcttattcacatgttgttttgcatcgtagatcgatgggaacgtttcgtcacaaccgaatgtctcagcgtactcacggggccaacgagccctcatatggacggccaagtagtgcttttttaggttgaagtaggttaagtatgttgtgctgcaacctagctctgggcatatccacctgccatttctgtgggagctcgtcccaatcaagtatgatttttccatcgacatctctgaggggaatatgtggcgatgtcttgggccacgccggaataaatttcccatctggctcaaatttggtatgttttgtttgagcatgtgcttttgcattgccctgggaagaaaatactataaagcatttatcctcctgcgcacgtggacaaggaaactctttctctccctgatcaccatgagcgttcctcgcgtggcgttgggcattgtgcttgtctgtaaatttccaatcacaccatttttcgtcggccaggggacaaggccacatgggtttcccatgtacctcctccgcatgtcgagctgcacttggtctcgtggcaaatcttttttcacacttgatcctatttgcgcctgggaaggggaatcctttccctcctagggagcgtcgcgatctcttaccaccatgttttctcgcttcgtgctttttagccgcacctttgctacgaaacatctcggtacactccttctctttggccaagggacatggccatctgatacgatgatgttccctttcagaatggaagttcgcgttcccttccgatgagaaggttctatcacagttgagatcctttgcatgtggacaagggagccttggcctaattcccccactatggacaagctttgcgtgctttgttgccgtatctttggcaccaaattccatagtgcaggacgtttcctctgccaacggacaaggccatctcacttgctcttcgtcatgcttctcagcgtgcgcctgtgcatcatatttataagagaacttcttttgacaacgaagctcctctgcgcgcggacagcgccatttggcttgagcgtggacttttgcggcatggccatttgccctccgtttcgagtaaaaggtctcatcacattgaagttctcctgcgcgcggacatgggaagacttcgtgataaaggtttgccgagtgatcatctgcgctagcttgagagctgaacctcctgtggcaatgaagctcctctgcacgcggacatgggaagcccctgtcatgtaccttgacatgcttgctcgcgtacttctacttctttgatgcgaatattttgtcacatccgaactcttctgcgcgagggcatgggaagggcttctccttcattggtatgttgatgaaagtggttggtggtggtgttgaaggtgtagagacttcattaccctcaccattcatctcacccattttagaccttatatttatcatcatcctatttgatctgctctctctgctgaaggtaacgagacctccggatgatgccaatgaggtccaaaatgaatggatgagtggttgaggggtgaccacagcagagcgagcagtatgatattccctatgagatttaaaatggatagatgagcaagaaggaaatgaaaagagctggaaagaggtgagcaataagagaggggatgaagagagaaaggtgattaacaaacacttcattaacaaacaggccataagcaaaccgccatacgcaaatactgcggtagcccgcatcctcactttaacagaagggtgtagtgacctaagcaatatacaagttaccgagtccgtcataaaatcggacttatgattttatgatttgagtatgcctttgaaaccgcctttcggttggctcttttaagttgtctttatggctgtcttttttggtgttttattcgtgcctagacctcggaatttcccatgggaagatccaatttggccgcctaattctagtggccaactagagggcatcccctcaaacgatgagctagctgctcgggctactctcgcggtcaaggcttcgcgcagctaggtgggagaacgctcgccaagtaacacaacactacaggctattttaaagcgctacccatgggggcagagatgagtagtcaagataataatattaattaatgatggctgagagggagagaaccaactacgcaatgggaaatatggctgtctcagacgtagcacatgcatagtgtcaacaaaagatgctattttgacacataggataaaatacgcaaacatatcttaaagcttgatttccttttatgggttcaatctacaaagtctctgctatatgaagttattgggttttgataaagacagaaattagggctaagaatgatacggctgagtatagggaccagaagggtagaaatttcagagagctaacgacggtacatactcagtacgcttcggccttttctgataggggctaagattcgaatagactgtcgaccagaaaggactcctgtaatatcgttaatatccctggtgttgtagtattagttgtatttacgcataaacacaattatactcattttagtttttagaccaggatcttttcggcagaaaaatgagctccctttgttcaacataggcttccctatatttagagtcaaggaatatcggtctatcaagtgtgtttcagaccctaattactctactacattaggtatgtatggaatattcaggagaatcagtagaatatccgcatgttcttcatttcacttttcacttttcgtaaatcagtaacgaatatgtcccctacagagtgttctccaaccgacgctccttgcgcagtgctcggagcttgacccgcgcctcctccagagggaccatgatgcccttgttttgggtcgcaggatcatcacggttgcgaatgttgacagtgcgtgcctccctctcctgggcacctacaacaaagataaagttgtactgggccagctggccagtacggatcttcttctgcagcgtgtttccactgatgtccacgtccacatttaacttgtcgccctgcagaatacgctgcagctcctgggcgtaatcattcaaatccggcatcaccggcacaataaggacctggcgcggactgatccagaacggccacttgccaccaaagtgctcgatcaagatacccaggaatctctcgaagctaccaataatagcacggtgaatgacaacagggcgggcgcggccgggggggagatcgttggactcgccctccttcgcgctctcctcggggttcttctcccggttttcgttggtctgatactcaagcttgaaattcagcggagcctgatagtccagctggatggttgcgcattggaattcacgcttgagagcatccgcaatggtgatatcgatcttgggtccgtagaaggcaccgtcaccctcgttaatggtccaatcgttacccttaaacttggttaaggccttcttgagctggtcctcggcctggtcccaggtctccaacgaacccatatacttctcggggcgggtagaaagcttcaacttgaaggtaaagccaaacagaccataaatggactgcaagaaatcgaacagaccctcgacctcggacgaaatctggtcacgtgcgcaaatcacgtgactgtcgtcttgactgaatttgcggactcgggttaatccgcttagggccccggatgcttcatttcggtgcaggacaccgaagtctgcaatacgcataggaagctctcggtagctgcgttcacggtgaccgaacagaatgaagtgtccagggcagttcatcggcttaagagcccactcgcgtttctccacatccaacttgaacatatcatccttgtagtgctcccagtgtccggaggtcttccagataccaacgtcgtacatgttgggggtctggacctcctggtagcctcgcttgcggtattcagaacgcaggagagactggatctgattgagaatcttggttccgttggggaggagaaatgggcagccgggggacacctcatcgaagaagaacagctcttgctccttgcctattttcaagtggttccgcttctcggcttcttccaagaacttcaagtgctcagccatttgcttcttgtcggggaaggcaacaccacgaatacgctgcaaagagtcgttggactggtcaccaaggaagtaggccgatgagttctagaattaaaagttaatgtgtctcttactcagtcaaggggtcgaacagtcacgcttacctgcatgatcttgaaggccttgattttaccggtgttctgaatgtgagggcctcggcagagatcgacaagggtaccgcaacggtagacggtgctgctttcaccggtgacgagcttgtcaatatagtgcagcttgtatttgctgtaggcgaacatcttcttgagattctccttagaaacctccaatcggtcgaagctttgcttctccttgaagatgcgcgacgccttattgtcaagcgccttccagtcagcctcgcggacaacacgtctgttttgccatgtagattagcattggcgcagttgtgaatggtaggtgataagataacatacccatcaggcatggccatgtcatagaagaaaccctgaggggtagggggaccgtgggaaagaagacatccatattcgcattcacatgcctcacccagagtatgagcactggagtgccagaatacatcacgggcctcggggtcgctgaaaggcacaagaagcacactgcagtccctctctagaggccggttcaaatcccacaattctccatcaaccttggaaataacgatattggcgctgatatccttgggcacatcgcgcaggaatgatccaggggtggtctcgaaggccttagcagggactgaggagggggggttgccgtcgccaatgtcaagggtaacgttgatctctgggtggggacgagtcttggtctcctcgaggtattgttgccaaagttcttcgaagagcttgtttcgctcaagcatgacttctgggagagtatcggggctcggagcctgcttgggtttcgctttcgcatcttttggaggggcagccgcagcttcagaggcgttgttggcctgcgcttcagcggcaggccgtacggggatatccttgggggtttcggatgccatttttgaaacccttggagcaatagcgcaagggaactagactgtgagcaagagcaagaagtctaatcgcggcgtggaggggaaaatgactctttgtgagggcggtgaaagataagtctcgaagtcacgtgatggtactgcccttagccgacactttaccgcttcaagtttccaccaagcgaaaacttctccagctttgtacaagtcaatcacctttatcaccacaaaatgtctttccgtggtcgaggtaacgcttctggtgccaaccggggaggtttcggtggtggccgtggtggtgagaattttccaacctgaatgcgatgcgagaagttaaaaggagctaacgaaatttttttgttgcaggtcgcggaggcttccaacagtcattcggccccccagcccaggttctgggtaattattcttctgaacctgactgtaattgattcatgtcgctgatatgccgatagagttgggttccgtgctgcactcttgcgagggtgagatggtctgcgaatcggtcaaccccaagattccttacttcaacgctcctatctacctggagaacaaggtacgccatgactgccgcaaaccattacaatttacaagtccatgacctaactgggttatagactcaaatcggaaaggtcgacgaaattctcggtcccattaaccaggtctacttcaccgtcaagccccaagatgggattgtcgccacctctttcaaggctggtgacaaggtctacattggtggagacaagctgcttcctctcgagaagtacgattcgctgttctactcattcttatatactctgactaactcacctcttaggttcctccccaagcccaagcctcccccaggagctgctaagcccaagcgcgccggtggtggtgctccccgtggccgtggtggattcggcgccccccgtggtcgcggtggattcggtgcccgtggcggtgctcctcgtggccgtggtggcttcggtggtggtcgcggtggtggtttcggtggtagcggtggtttctcccgcggcggcggcggcggtggcttctcacgtggtcgcggtgcccctcgtggtggcggtggcttccgcggtcgcggctactgatcgatccaatgtactgtctctttttggcgttttgggggatctgggagctttttcaggaatatctttccgtcttcttgtgcatcctgcgcaattgcaacttcactggctgcaggctgtagaatatcaccagtcaaaaatgtttctgttatttttcattggattttccagaacttgcaattaaaccataagacattcgtttagagattcggggatgatcggctggacatttggttgggatgtggctagcagatgtggcgcagctgcaccgcccctgcctgcctgcagtttgaaatgacgttgaccgctcagcgaatctgtgcgtctgtcaacactcccaagcaggattgacgacatttttattcttcttacccaatctcgccctttagacattttattgagacagagtatccttttgccgtaaaaattttcgaatctgatatccatttgagcatgtctcgtcggacatcgaccatggcatcgagcaattcttccagcggtgtcccaccttcaggcgatggaggtgtgtttgagctccctctgatcgtgcattggcaatatagctgacatttttcaggtcaggagaaacagaaaatgctactttcctcggatcatggtcatttcagcctggtgaagtcagtctcgtgcttcccgcgctcctttgccctcggttcagtctaacactcaacagggccatgcatcttgctgatctgattactgaaatgaatggtaagagatcgcaagatcttcagactttgtttgaattgactcgctaactctatcttaggtttctgtggaggcaagctcatgttccccaaccgtttttccaacccgcgactaatatgttgagcagtcatgtcggtattctcctccatgcgctactgcctcggagacccaactgaatacggttccatctgggctgccctcgcattcatgcctttcggtttgttcttcgactttatggatggcaaagtcgcaaggtggcgcaagaagtcgtctctcatgggacaagaactcgactcgctagctgacttggtaatggatccccgcgaataaccacaagcgagtttttgctaacacccttactccactagatctccttcggtctcgctcccgccgctgccgcattcgctcttggtatccggacctcgcttgatcatgtcttcctcacattcttcgttctctgcggtctgacccgcctcgctcggttcaacgtgactgttgccgtactgcccaaggatcaaagcggtaaatccaagtacttcgaaggcacgcccatcccaaccactctttcaatcgcctctgttatggcctactgggtctctcaaagctggacgcacgagaacattcctcttggacttgtcgcagagggtaccatcttcgaattccaccccgttgtcttgatgttcgttctgcatggatgtatgatggtcagcaagacgatacacattcctaagccatgagctcaacccatacttggccgcgcatttactgttggaaaaaaaatgcctgagtctgttgtctctctcaacttggacaactgaaaataaatatcgagaggggtttcgtttgtaggcaaggcatagcatgatctcgatgcacttaaatatggatgcttaattgaatttcaattgcatagattggctatagtcattgtggtttctgcgtagggtggtcaaggtcaacatattgaagacgtagctttcggcaacagcgcaacccttgtaagcaagtgagccatggattctctgtcaaatttaacagcgcgcaatgcacaagcaatgctgaccactttcataattccatggtcagtacacgctgagaaatcttaaaatgaggtagggacaagatagaaatatcaatatgtaaactgacactttccctggagggtacgccttctgtgtgtgtggagatatatccactgttcatcatagatattgtatagacatccacgcaatgttgacctatagagatcgtcataatgaccactcgactaggtatctctacagtccgttcaacgaagacttcaatacgacaacaaatcatctctgaacacagcaagctgtagtgaaggcatgtatacatcctccctattaccagctcgtagatcgcattgcatctaatccaaacactatagcgaaccaagcctaccaccaccacccgtggacaactccaacgatgaccatcaccagactgagcccccccaggtgcccccaatgctacagagatggcataatacggatcgtcaacggcaacatcccgaatggcaatgcaggtcgtccatattatatatgttacccatgtgatcaattcatctgcttcgctgatgcacgcgggataggtcccgctaacccgctctgccaatgcggcgagtacactcgtaggcagatgtcgggggcgccgcatgggattcattatgtttgtgctcggggatggtgttggttctacgagaaggagatggagatggatgctgtccagcgacaggttcctgccaggtcggtggagatatgtgcgaattactcttatatctgagatttgaggtttggtttgggtttgggtttgggtttgaggatgttattgtgtttgttcttcttttaaggtggtttgatttccgcttgtcgtgattttagttttaatgctgaagcctgaattaagtacccaactggttatgtctcttctccgtaagcaaaacgatactctctcttccgaggaaagcattgagccggcccatccgcatgctctagaacatggcagctagcatcatcgaaggtcacaggcgaagtcggaattttaggatttaaaattagaatagcgttgacacttgctaggcatacagggaggcacacagggtctagacccacagtttcactttgatatctgaattcgaattttcattacccacctagggttcgatctagacggccaaatacatacgaaagattcaagcaaatcaaatagagtcgtttatctttcaatttatattctctcgtggaccggtaagagaattcgtttctacatgatccctttgacaggtggagaatccgactggtctagtggacgccactggtcccggaatatctcagtgtggtccagccggtatttccgtcgataaggtctaggcatgtgtgcttgttgacatcttactgtagagtacggagtatgcagtacagacctgtattgcctgtgtatgctacgtttttggaggctcttggctaggatgtcgggtcagacccgatcatgagcaatatgtctcactgttggaagatcgctcatccattgagcttttattgcttattgtttgctttgtgggctatagagttagacgtgggcgcctttagaaggggaaagaagggaattgtgtcgaggacatgagttggctataattatcaatcgtgggcaacgagacgctaagttacctgcgcaggcaattctgttgaccgttgaggagtttgattcccacatagatcacgaggttatctggcagttgcaataataatagaatctctgactcagaataggcaagggactagatctgcaaggtacagccgatatattacacacactcgatctagagcgcatttggccactagtaactttatctctctgttcagtaaaggtcttgtataattctcgcatgatggtaatgtggttgggttaataacctccggtatctcagggtttgttatgagaatatgtagacaatgctatgcagtcaagtcaggaacaaaatacttgaagcaaataaacctcgagaaatacaacatatcatacaatatacaagacaaaagttcaagatcgaacccaaccctaatacatgccatttatagaccatcatacaaaggtagatcttgagccgcagccctattttacgagtcaaattatgcggttttttgttacaggaacggtacggcgtattaccgtagggacagatcataatttggtatactccacccgggagtggccgcgcattacccatggaaactatttggatacgtggaaaagggggcatgaacaaggatatagaagaaatcgattgagtacggagttcttgcgattacatgaagtataaggctaaattccaattgctaaatccttcatgtttcatgttgtatggagtatggagtacggagtaacgaaggttattatcccttgtacggagtattcaaattaactccgcctaggaaatgagccctgaaatctctttcaacagcaaactctgcaatctatcaaatggagatctaaatttaccctggacaccagccaaggatacaattgtcagccacaaaggaccgtggcgtatggtaaccggtcatttaaagcgaaaacacaacagagacggatcaaaagcatcgttagccgaggggtgcgttgtacaattttgaggggtaaaacactccgtcgtcatcaagggtcttcttcatgtggcgaaggatgcaggtaactctgtaaagtacggagaaatacggtacatactctgtacgtgcatacataatattgattatccgtcgaggttcacacaatgagggtctcataatcaccgcttggcacccgaagaagactagcggcatgtccaaggactccatccagctcccgtgtctgacccaaataggaaaatgatcaaccacagtcccctggcttaccggggcaggtgcctgattacctaaatatatgtcgacgtctcattggtgggattgtttgtttgtctactttgtacctggtattgtaccatacaaggagcaaacaaccttgaaacgacccgcgaaactggtgggctgaaagtattcggtactcgggtacaccagggttagcctcctatgttccaagtacctggtacataatgtcacttctccggggaacacagaccccttaacagtccctttctcaagggatccattatccgtcacttcgccctcctgatcttcctcccctttgcacacattcgttactcgatttcttcgctcgtttactccctttattcgagggttatcaactgaattgctttttacttcacggtcgctcactctctcccgacttgtagggggtgatcctctactcgacaacgtactccaggtaccaatcaacacaacgcgaaatcaccttcttttcactctttttccgaccgtcaaagttcgactttcgaccatacgccctgaggatctgaccgaataattcaggcccaacgtggtagacacttttgagaacaaacgacgtctactggcatacattcaaacagaagttcttgagggttacgcaggccgttcccagtccttcatcaatcacccctgcgactgtgtccagcggtgcttattctcttcgttgatttcgatactcgaattcactactctcccaacacatcatgcttttcaacactcatggcgccctcgtggtgtccggtgtggtgatggcagccgccgcggcagttccagaagacttcaaggtggtccgtcgtgcgccgttagggacacttcaaggttgttactctagcattcctggatatggaaagtcaacaggctggacataccaaagttccgggtggtgtctggaccactgcgccaaagactacgcgacattcgctttgacaggaggctcagactgtgtgtgtggtaatacgatgcccccagacagtgccaaagtttcaagcgacaaatgcaacaaatcctgcagtggctggcctgatgatatgtgtatgtctatgcccctccttcatcggtctcaaagaattgacttgctaacgaaattctataggcggtggtaccggctactactctgtctataccaccaatttggaagacgacgttcccacgtactctgaatccgggtccacgaccaccacatcaagcacgagctcgagcagtaccagcagcaaaacgacgacgcaaaccgatgggtctacaactgctcccactactagtagtagtattagtgaagttaccgaaaccgccacatctgagcctaccacgagcggtctctctgaagaggatatcaatgaacagtcctccaagggcaagaatactgccgcgattgcggccggagtcgtaatcggagtggtcggattcgctgctctctgtggtgctgtcttcttctggtggcgatccaagaagaacagggtcggtgctgtgggtggggttcctggcggctatggccgtgactctggcccgccctcgatgtccgattctcgcttcgatggcgactacatggctcagcgccgccaaagcaatggcagcatcgatgatgaccatgacttctctcgtcggatcttgcaggtacacacgtacaacgcctaaaagcattgtttcgaagctgacttgtgtcacaggtgacaaaccctgatcgttaaaccaatacccatttccgaaccattcatgctcccccccctttattctttctacttggtattagcgaaacccaatgtcatttctatctcggtcgcactactttatgagagcttcttatcctgttgtcattgtttttttgtcgggttattcagcggagttatgatatccgaacggcatatggcttgatccgagtcgtccccagctggtgacctgtgtctgagtttcttttaccaatccgttccatgactgctccatagacaacgttgccctacctgtccagcacctcttattgtctacattgggaaaacaaccgcaccatcggccttctctgccgaagacccggtcattgtatcttgttcaatcaaggtgaagtctctgatatagagacgagttcgaaaaggcgtttcattttatttcaacttgaatgctcgacttttttttttctttttatgagcaaaccattcctttatgtgactctttttttttacttttttttccccatgtggtctcttttcctatttccagtcagatctttgcccgtcggtcctataatgagcttctcgcgttctgcaattcgctccggtctgatctgattcaaggataggtggctgtagataggcgagaccattcagctgtacttaatgtgagaatcgatatgcacatcagtctacggtcatttgcttgtaaactagaactaaagtgatttcaattggtcgaagctgggtttgccgttagttcatatgtatgtcttggatatatctgagtgttttagtgtttattcaatcagtatatttgcattgatcatcttttaatgtctcaactggttcacttcctatgggcctagcgatcctagttcgtaaattgatataatcaggtcctaagtcaactatatattgtgacatcaccttcaacccggaaggtttatcgccttggattaagtcatgcgcctcactttagacttagattctaagaggcaatgaataatgagaactcattacaaagtacaagagaccgaggcagaactccaaatttattcagtatgggagctcaatatcaaatagatcccccaaaatgcatgtaccaccgcacatcgcaaaccatcatcgaaagcctcaacggaggcaacggctcacgaagatcacctgaagagaaaatgagaaaagatcgagacaaaaaactacacccttacttacagcagaggaatagccaaaggaaatgccgccatcatgtccttgtaccagcgagcgatgttgggatcgctgtggtcatacttctcccgaatcagcgcctcgatggtttgcttgagcgcgaggacttcgatgtaccaaggcagggcaaactgggtctcgagacggaggtactggcgagccgcatgctcgaattggacgagcttcggatgcggcgtgccatcgctccggagaccaagcgaagacggagcctggaaagacgcatgctggtgggtacaatattgagtgtatgccgccatatctgcctaaacccctcgaaatgtaagtggatattgtacgaaaagagcgatgaaacttacggcatctccaccatgccggcccgcgaggctgtgggccttgccgtgggatttgatcagacaatcgagagccgagcagaggtctcgaaccgcccctgcaacggcgttgacaatctcgatgtcgtgtactaagcccacatcctcgcctttgccaatcccggattcctcgttgatccagatctcctggacccattccagcaatgcctgaagttcgaacccgtggccccggatgccttcgtaaggctagaaagaagtattctagatgagtacatacacgactgaatgacaagagatcctcaaagaatacccacaagttcacacctatggcgggcatggcagcatctttggcaacgcttcgaggtgactggatcgcgaatgcagttcaccttgaagggttgaccccacttcgtctcgtcccaggcacgcagtgataccctgaagcagtggatacaccaccccgtctctgcgggaaaagggtattcgagaagttgcgggtcaaaacccagactcgctagtgtttcagcaggtgttttcggaagcatgatgaagaaatgtctttaatggagaaaaaatgacattgaagcaggatgcagaggtgaagaagagaagacaggaaagtgaaagaatgaaaagatcagtctcgaggtaaacaaaccttgaaaggtaaacaaagcaaacacattagatgagtctgatattcctttgatgttttcttggaaggagcaaacgagaaagaaacgctccttccttttccttccatcctaaatgaggttattcgatcaccgctcttgcctagaaatgtctgggcatagaacagtccagttcagtctgtttttggaccgaaccatacagctgagataagaggaaaccctctagctacccttcgctaatgcctacaaaccatctctcacttccccatgatatcaggaaagagatacacacagacctcaagccacataggctataactgccagctggctagccccaacaatagccaacaacctagtccataacacagcctcgcccccaacttactcgttgagatccatggtcccagtaggccaacgccggacccaacagcggctgacagccacatggcttcatgcgacgctaatctagcgacgaactagatatgcaggagagagaaaagagaccgaaggattccagtcatgctggtctcgttggtagactgtggcagctgataaatcgagcgtgttggcgagttagcctttgcccaacgaaggatggagtatttcccgttggggctgaaaattagccgctcaagatattggacgcagactaggctgaaaagagtaggacactaatcgaatgagctgtttttgatctagttgacatgcatcaaagcctgagattgccactactctttgccaacttccctcctcggtacagtcctccgtgcatggtcacatatttctgctcctacctcatgtcagatatttctacatatgcggaggtgccgtagattatacagactcgaacaggcgcggatcaatatgaaatataaatatacaccgtatactgcatcttaaaaaggtccactccatacaacatagagggcaatcatagcacgctagccattcctattctcagcccgcttcaatcggacaattatacagtcaccccaagactgcaggacaattagccaatcaaaattgcagcaaaaccaacagcgtcaccaagcatgactagcagatgcacgctggcgccctgaacaccgggtgcgcatgatgtcatgcaggtagtgtctatggctatgcaaagctagactcgagcgcatctagacagggtaatatgaccccgattggcttaaggcttgttgttggttgttagtagttccagaatagcaattcctccgcgaactataaaaagacggtgtattgttccctaattagctttgtgaggtggtatcctagcagccatgctagttgctagtctaggtacttgcatgttgggaagactaaaacggtatagtattgcgcttagtgtgatgctctctaagcaacctagttacccaagcaagccaaattaactacccagtgggagtactcacccgttgagtgatctgcaaaggcccacagcttttggccatgtggtatcgacggaagagagcgggaatcagccccgttcgcatatcggaaattgtgactctccgtgcggagtatagcgaaagaaccgtatagggaaatgagaaaaggggtaatcgggagaatcgagatggacaatatatattgtagatctatttgacccatactaagcactgtaatgtcggagtaactagataaatgcatctcaaggtctttttttcagggttagctcgttcaaacccctttgttgtgcaggtcggcgtttgctttcggcttagagttacattttctatctatctatctacaacatggcaattacaggtactactccataactgggagatgaaagtaccgacatattactagattacaaaagtacctggtagtattttgcgttaattcgctagcatagacggataatttaaccatcaccgagccgatatattatgtactctgtacggcgtgtgatagtgtagtcaactagctaatggttagttaatggttctaaacaagaatatatattatatcattgcttcgcttcgctccgcaacaaaatatgcgcacgagcactttctctaaccactgacatgtttgtccacggacacggtaacgggaacgcagatgaaacagacacagtcgcctattcctgttctagttaacagtccagtacaaattatctggaattagctagtggctatcatctcatgcacacgctgcagtagtgctgcagtagtgcctgcatggttacgtgccctaaattagctcgcatttcttttccttttccagccacatgggctacggctcggccgtacgggtactgagtacaaagtactatgcatttatatttgatttgctcgaatcaaaagagattgttttcttttttttaaaaggaagagtaaaaccaataatttattgaaataaactcatatcgctatacataatttcccgagagattccacctgcatgaagtatgtatggggatcataatggcagtgctatgccattatattatattaaataaccccaaaagaacgatcattaccagatataggcattggtggtcaggcactcgaaactcgaaatctgcctcgcaagcatggccacatggcatggtctgatcgacgggtctatctgaaacgggatcgaaatggcccaggacctgcaggggcatgccattagcgcaggcttgcaaaggtgtaaatgtcgaaaaagcaatgctatgccgaagctcctatgaaaggagaaaatgagtatttattctaattcttccgacttcggtaaaccgttgctccacttagagtccagactcgacgctcttcctttttttagtatgttagagaattgctacgatcggagcccttgtggggaaataccccagaaacaggaaatttacgtagattccttgatgacgatgtatagaatgtcagtaactatagcatcctggcaacactaggcgtggcagatctcgggacatgaataaggggattgtcgagcgtgcaggtgacgagtcatgttctcgtcatctcttcggttaatccctgaatgatccctgcaagtgtgctgtatgcggtatggctcgttttggtcaagacaggggaacccgcttggaagacaaattgcctcactaacgatcgccagtgacgatggagcaaaaaacattgatagatagcgacgatctgctggacaggactggaccgtgcagatcgatcacactttttctggcctacgaagtccatattgagacccgctgcattggcgataatcgcgatcattattgtggagctattgaccagcacctggcagagagaaaactcgattcaccaacgtgaacagcaacagaagatcgagatcatagggataatggcgatgctagtgggggtaatcgtatagccgagtggacctgacctaaccggattcacataatgcacatccgcgcttacaatcgaattctagcatttggtgccccttccacgtgggcgcagtcaatcaccagaccctagcaggtatcggaatctacggagtttgaaggggtaaccttgctacataactctaagaggaaagctcgggtatagccgatgtctcctatctctttcggccaatcccaagcgagggaggtccaggtagttcaaccgggacatcgggaatagccgtacaacatacggagtaattccgacggtaaacagtaacttcggctatttatcccggaacagggggacggaggacggagacggagtatagcaaatgtcctgcgctgattcgaacccgatgcacccgggttacagggccactttcttgcgagttattaagtcacaatataactacagagcgtttagggaccgccaagactcggagcggttcgatcaaacgaatcagaaataatagcacttctaccaatcagaaaaataccctagatctgaggtgagattcgtcttccatggaatactccatgatgcctatgatgtacataactgactagttagttagcacgtccctcttatatcattgtacaagccttatccgtaacattgccacttcgctccttcaatgcttaaccatcctgagaatcgtgcgatccaccattacgggaggttaaaaggggagcttcagattcaccgattaacatgctactctcggtcccggaagggccacctcttggccaaagtgagctgattgaaattaaagagcctcgaaagcttagggggccgagtggggacgcatacacgctgctatattccgagtccaaatcggtcatttctcatctcccttctgtccagatcgaagtcgtccaaatgaaatattaacttttcaagggacgtactctaacttgggtgcgcccatatcgattcaaaggctctcaacatgggcgcacgttgcggatacatactctaatttaatctaatacacttcgaattgtgccacagtgtgaattgctactccatacttcgtacccgcaaattagtttcgggtgctattttgtcgatcaggaacgaatgagggagggcgtaatacgtataactatgcactccatacacagttatcaagtggctgtgtttatatctctaccacaacggtagtataagaatacgaagtatgaaaaggtactccgtagactagcgtgcatggcctggcgtaggtcccgcgtggacggagtaagcatctaaaaaaagaaccaacatcaaaccgacctctctgactggctcgtttcacaaagtatagtcacatagtcaattgtatgttgcatgcctttcttcgtgttctgcatggcagccggtactattgtaagcaaggcttattcagagtaatcttcatgttcaagaaaaaaatggctattcatagattttagatacctagatcttccgaagactggcagctcatgcgaatactatcaatgcagcatcatcccacctgggcatacataccccatattatctaaatccctcaaatgtggctgttgacatcatctaaacgacaatggccgacgatcccaacagcgctacgaaagaataagcgctgttagatttttacatacaaaggtgagttggcgacaccatcctaagatttgaagcctccatgatctacacagacgctaacagccacgagccatgggaaattgcaagcacagcggaaaatagcgcgaaacagatcgcaagcatagaattaattccctcttaaaaagaccgattggtccataattgcacacttccatattaataccgggtccctctacaccaaaaacggcctagatcaagattatgcacaacaaggctgtgagcgcaactaagtaacgacgatcgctagggcccaaaaaaggaaaagaaaaaaagtccaattacacaaaaccccaggctaagcccgctttctggccctagccgcagcagccgaccaaacatggccaagacccactcttggctacagtgggagcatgttgtatagggcagggcacgaaggagaggcagggatgcatcatgcgtgtctaaacttggaacctgggaaaaattaaacgagaggctgtggtatagttcccgcatgctgcatatgtgcctcgttctggtttgggtccgtctatatccagttatggaactcgtttcaagatccctgtaaaactgccttgcgatcatgattctcatcgtggatcctggtaatccgtgatctgcaacaatgtacggtggatcgtgcgagaagaacttctatatttctctccacagttacctagtgcccgtgatctgtctgatcggtccgtataacataggtagatggtggtatatactagtgacgggcgtcagcacgggacgtattttagcctggaatgatccttcgaggattcctgcataatgtgcactcccgctcgttattttagtctattgttccttgtttttagggatgtgcttggcggaaaggatcttggaaatttagagaagcagggatagttagaggtagcgtgttttaatgtatattcagaattaaatttgctatagatagcgtattaagttcctgatgcttgccctgccacgagggtgacaggggacctattctccggtcctgcatgcggtggcgtgcagggtaacttagtcccggtgttgggtccccgggacaaagatggtgtgtatgaggattcatatccttatactccggatgtaaatcaatacgaccttgacaatatggtgggaagcaaatagttccccacgaaccctgacgttttgaaatcggagcccggagttctaaggtatccgtcccctcccccaagagtcaaggatcggcgcgctgaaacaaaagcgcaaaccttggaaacgaccaaatgccaagacccagccaaggtccccggggccctctttctttttcttttctttttttcttttgccctttcccttttgggtctagtggatccggtctagttcggttcaactgacctcaagtttggttgaggctttggtcgaatccatggatccaccgctcccgttctggttgaggtcatatctgacatttgaaaaagtacctcttcgctgtatatcgtggagcgacaaaagattaagagtatcaaagtcttattttctataattggactgtattcctaattcagaatatcccccgctagtccagtcgatatcgatccagccctgtcccgagcctcttacacccccttttcggaatagcgcgaattctgggtctgcgagttgcccgaatcagcgcacgccccactgatatttatgtcccttagcttggatggagcaaacccgttacattccgtggaagcttggactcgcagcctcgggtcctccacgttgacaggatttggaatatcagagccattttagcggctttcatacatgggatgatttgaaatcattgagcttattctagctattcatgaatggatacggagtactccgtattactttaatcctaaacgctaattcacggtacttccattgacggtagccaaattgcgcatctctagcacagccatattccaatttcttattatcaaagggcggttgcaaagcctcagccgcactcaggttcttatgcaatgctgtgtaaatttagtacgcttatgctctgatcatcccgcagagcgatcatcgcctccacgcccgtgctgtttccctggatctaatctcagttagccctagttgccttagttcgccttagttcgccttagttcttatgttggatttattttggttggaattattattagcttggatattgcgattaattgtttttattttattgtttttttattttggatattaatttccaattcgctcaaagtttattaatcctcgtagatcgtaggaacagtgtatatcagtccactctcttctcttcctcgtctcttctcttctttcaatattctctgcgtcttacatctcatccataccagcctcatatctatcctatcattcccctttcatacttacccactccacttacattctattctccaacacatcatggctcggaaatctacagggcgcatcagtccaaagcacatcgtctctgtcttgaactcgcctgccgtttcctcctcttcgccagaaccccgtcaactagcggcttccaacgtggtgcgccggaagaagaacattcgtccaaacttggcagatgcgactattcctgtaacctatacaccaaccacccatcgcatcagcaaggccaagaagggaaaacgtgtacatgcctgccaatacccagcatgcggaaaggtcagcacaatcatcttcacctatcaaacatcaaactgactccattgcaggtcttcaccagggcagagcaccgaagacgccatgagttgaaccacaaccccgaggcatcgtaccgctgcgcaacagaaggatgcaacaaggcatttcaccgcgctgatctgcttgtgcgccacatggagagacagtgagtaccttgggaattggctacatggcgcatactaacaaccatggcagtgaactcgaatcgaaatcagaaaagtcctcattggcacccaaccccatcaccgagtcccctgtctcgccctgtatgtcaatggaccacggaattccattggctgcaacctcccattcacactccatgtccatcggcgcactcgtggctcctggcatccatccggatcttgccaacaacgactgctcattactgtggagcggcatcgaattgcccctacagccccgcccggctttccacagccagctgcccgagtctgtcgacgacagcccgttctattcttcccccgcagagacctgcccctcgcctctgtcggatgcgactttttctcttcctccatactcgagctcctccatctcttccgctgggtctgtcatcgaccagtacccgagcaatatcgtgaagagcgagctcacttcgtccccgcttcagatgcacactccgctccgttggagtactgagggtggcatgcctccgtcggacctggtccccatgtctatgggggagaacatgatccagcctgttcagtgccactatccctctccttcgtggtccagcgcagactgccttccatacgatgaccaggtccattccatgcaccagttccagccggtgagctgggccatgtgaaaagatcgaagctatttggtcaaacattgactgtagatggctgaatatctgacgactacacgaccaccgcatttcccttcatacgaaaccggcacgatccagccccagaaaaccttgaactccatgacaaagacaacaggtgtgggtccaaggaacgggaggcccggtgtggtctcgactccctacaaatggctcaaccgtcattagcagggctctccactgactccattgttgcccggaatgtgaccgcctggaggatcgcctggacttcgggtccgtcggtcaccgccgcttacaccacgcggccacaaaataaaagcccaaagaagataagctaatttgccgatatcggctggttaattccttagtctggcgtccagagacaaactgggcattagactggaagttttttctcttctttgtttaacgttttccttatgtgagatttccgacgacatgatcatgattgcttgtttttcttttctcatttgtctacctaactactacaccattatacccctacaggccattcaatgtacctcgaaactcgttccaagctgatcttcatactcctacaaaagtaaagctcaaattcaacaaaataataaccccgatataaagttcaactctattaaacaaccacccatggttcggccggccgtcacaaaacccgtaaaacgcaagcgagataagcgatctccgatcggagcggaaatatcttccacagagtcgaagccgtcgggataaactccgcttatgtaagggcggaaccggaacaaagcgaccctcccccttccttccttcattcacctggggcaacgcaatgacaaggcaacctgagagactcggagcttccaaccactcaaattccttctcggccgtaagttggacagcgtacattatctccgggtagccttgggccctaccttacaacgaattgtagcttacccttcggacgaaaagacttggctacctccacctttagtcccgcaatacccgcaacacccagcctattctcaatgaggtatacggacctcttcgcgctagacttgttctgggttgaggggggaatatcgttatttggatgggcggggggtggccgcttatatttgtaatcttttttagttatcttgagagttagttaactagttagttaactatgtattgtgggtttttggatgagatctggatggtcttgaggtggggagttgagggttggttttcgactgatttataactacggagtacggaatacggaatacggagtacttatattgactatctaatgtattgattggccttgtatccattgtctcttgtcatgttgtatacattcttcatgtacttttctccccgatggagtgagtaagtgagtgagcgagtgcttcgtacggagtacactactctccgctccgtaggtactccggataacggagtagaggaactagagctctcgactcggctgtggggcatgttaggctggcgtgtcgatcaggggttctcgggggtgtcacgcggcttttcgaggccggggctttcgttcagacctgcctgcttgagtggtggtgtggatttgctatttgtttggattcttggattcggtgtgttgggcatgattgttgtggggtgtgaagtggtcttgtggtggattgctgtatgctgacgcagttgtacattgggaggggagtgatggctgcttatactgtagggacaaagattgcatcgggcttatagttgtgggccagaagcaatttttgactcgtgttgtagtcatctttatctgaaagtagacagaaggctgcatattcattggtgtagtcctatgaggacgttccaaggaacagaaacaaagagaaagtaaaaagcaggacttcttgatagctgattactttgaccatgtacgatacatagtatgcaaataaatttgatccatcattctcaacgattccctacaacatagggaacgccatcccatcgcctcgaggatcactgcccgcagcataaaccagcttcccatcatcatagtacgaacggatgatctggccgcgaccaaacatagcccgcttccaacctttcaaaacctcaatcttgtgaccaagacgacgcagtccctccacggcagcatcactaataccctcctcaacccagatcgtgcggtcagtactctcctcattcggtgcagcaatacagaagcgcggggaatcaagcgctgcctggggatgatacccgaaggcaagcatgttgagcataacctgcacatggccctgcggctgcataaagccacccatgacaccataaacggaatgtaaggagccatcggcgatattagtgataagggcagggatgatagtgtgatatggccgcttgcgcggagctaggacattagggtggccttcctgcagcgaaaaattggcaccacggttctgcagcgtgaagccacagccagcagggataatggccgttccgaacccggcatagttactgttgatgaaagagatgccgttgccttcgcggtccgtcactgcgaaatacaccgtgtcgcagtgattgtgtgctggactgccgtggtccaggatatccgctgcgtgctcgggtttgaatagcttcgcccgctctgcgaggtaagccggatcgagtaggccctgcgaaggtacgcgctccacgtctggatctgtgacccaccaggctgcgtcggcgaaggcgatgcgcagactctcaatcacggcgtgtaggtattcggctgagttatgctgggcctcggtgaacttggggatcttgcctgctttctcgagttcctccatgatgcccagtgccattagcgccacaatgccctggccatttggtgggtgctcccagatctcaacacccttgttggcttcgccatctgtgccggatgttgattttgagacgatatcctggccggtgaacttgagtgaaatcgcatcgacttcctgcgacccgacttcggcgtgataggctagatcctcgagtgacatgtagccgcccagatcttgcaccacctttacgatggcttccgcgatccggccctggtagaatcctttcttaccatctgcagcgagcgcacggaaggtcttggccagagtgggattcttcatgatctcgccgggaagcggggctcgcacgccatctttggctgaaggatcgactttcaacatctcacggaagtttggagatgcattgcggatttccttctcagaaacattccactgcgcggggttagttgatggtgcgattgcgatggaatttaatacttacgccctttgacgaaagctccgacaccgggaacccctcctctcccagctcaatagcaggctgtagaatctgctcgagcgataacttaccactaccaaacttctcaactgtatccacccatcccgcagccgctccaggcgtggtcacagatagagcattcaacatgggcatgttgcccggctcaccaggggccagaccgaggtccttgcggactttctccaagctggcattaccaggataccgaccagagccattgagcgcatgtaccttcttcgtcttggcattgtagaagagacagaacatgtcacctccgataccggtagagccaggctcagtcatgttaagtccggcggctgttgaagcatgagatcagttcattgtttcctgttgtgattctgcaactcgaggcgaggcttacccacggcaacagcagcatcctgggcaagagaataagtcagtattgttgaagttgaatatgacacgtagaatggaacgatgtacataccgctgcatttccgccctggctcaggatcttatggcctgcagccgcggctagtggttgagtgcatgatacgatgcccttggtgctgtggacggtactccgtcgactgggaaatgggacatagtccgcattggagcgcgaatatacggcttttgcgttgagcggcatgacttggatgatgaccccagggagaagtgggagagcgggggatatgaggggatatcagacgcttatcaaccccactaatttccccgggctgtcgcgaatgataagaacagtgaggttttgcgaattggggaaagttgttgactccaaattggactttataattactaaataactactctgtaacgtaactacctagttaactacttcgtacctaagtacggagtaaataacactcactatatatatagggtactcttacccgattaggaaaggccttagcttatgtacatatacctggtagttcggccgaggttagctagcaagggtatacacatatcgttccatcgttctatcattgttctttccacatactttgtatcatcagagacctcaattctgaaacaaaaacagacatgatcacgtaactcaccgccccgacttcggagcggcaattaatccttcgttccgccatcatcccgccattgaatttcctatgacgcttgtcttgtctgatgaaactgatcttgagaaaggcctctgatggagcagcatggtggtatttgtcgacctcgatgattcattcgctgacggatcggcattcttggagaagccataccctttgattgctgaccccaacacggagtcagccgaactacccacgtcgcatacttccccgaataaaaagaccgatgagatcttaaaccccaatcggaatggattctccgcggctttgagttgttatccgtatgtctttgtttgtcaacagccagcaaataataagaaacagaccccactaacagttcgccccatagcattgtcaaggaaatcgctcgcgctatcgacttgaataccctctacgccctctcgaatacatgtcgtcagttccatctgaacttggcaccgtttcgccagcaattagcgagagagaccctccggtgcgacaatgaatacatcgaaaccctagcagagatgctagacagcggcgctgtcctcccagacagtgtcaaatcagtcatacgactactgagccgtcccggcggcgagcatatccgcatgacccgcgggaaggtgggcaaatgcgcgcgcgacatggtgggcgaatgtcgacgctgcgccaaggttgtatgcagagtaagccaaatccgcccccccgcctaacaaataccagtcgctaaacccagctggcagaattgcacaatcaaacccccttcccagccagcccttaaaaaccgtatccgccgcctctgccgaacctgcggcacagcgccgctctccgcccacctctcccacacaagctcggacccgcacacccccgacccgtttgatgagaacagcgtcgcggctattgcgttcgcgcgcaacccttgtaattgtgaggaagctgtctggctgtgcacgcagtgcggaatgacattgcgcactaatgacacgacataccgtcgtgtctgggcgtggcgcacgcgctacagcacgtacctcggcggcgggttgggtactgacattggtgaaggctgccaaggggtcaagtgcgggcgtggtgagaactgtcttgctgcgcaggagattgagcttgaggtcgactgcgaggctgatgaagggtctgggtctgggagtgacactagcagtactgtacagagtcctgctcctccgtcgtttggttatgaaggaattggtatctcgatggacagccatgacgatgaggagcccggatattgcaggcaggaaatcattgggttgggtggtgttgttaagcataagtctaagaagagagtcaatgttggtgcatgtgttgttgagtatgaggacgagagggagacagggaattatcttgagagggaggagaagggtttgtatcgtggttggtgtgggtggtgttctagagtaattccggcgaagaacgagcagacttgattgattttgctacttatgactgtctgctttagggctttgcatgttgcatgctgcatttgatgcttcggcgacttttttattacgactgatgctggtgaagctttgcattaaatgacatatatcatgacccatgatacggggtcgcttggacagatgctacgatgacctcaagatagctatgcgagatgtgtaaatgacgatatcacaaatcaaaaaccttgtcaagttgatgcatattcaattaaatcttgctaataagaaacaattcaagtactcctgcaatgattcgccccccaatgcaagcacaaatccatcaagcatacaatgtcatcaagcatacaatgtcacatgcagatcgtttcgttaaagtaaaagacaaggttggaagtgaaaaggtgcaaaaaatccgtatggtctcaatgggcagcaatcgttctccagatagtcttgagcctcgactcctctcgaggaggtgattcctcgcgcctgtggcgacgatgagagcgttcctctcttgactccctggaacgccgggaggcgccctcaggcctcttctcccgctccctctccgtatcaccttcaatttcccgttcacgtgcgtgctcatgcgcacgctcatgcttctctcgatctctctccctctctcgctctttctccttctctcttcctttcctctcttccctagatcgaccgtgctctcggccgtgctctcgaccgtgttcagtcgagtgtcgcactctcctgctctcagtgcgctcaacacgctcactgcgaggatgctcctcttcgcgtcgtgaccgtgatccactagaccgaccagcagactgaccctcctcatactccgcccgatcgtgacggctgccactgctatgacttggcgatgatcggcgcggattttcaatcggcggtgcagccttggtggcatttaggcgcagcaaaggcccattggtatccgacttgccttccgtcatgtatcgcaggaaggcacggggcttgggcgtcggtagcgatgttgatacctgcttcggtgaagaagtcctggctgagcgggctcgttcgagagggctcgagggagtatcggaggtgcggcgtttggatctgtgctcgatgacttcggcctccatttctggttccattgctctctcctgctccttcgccttctccttggacgagctcttcgagcgtttcagtttgtcaggggcggggatgccgctgcgctctcgttcctcggcaagagcgcgctgctttcgttgcaactgggatttctcatcatgttggcgtcgtgcttcttccagcgctttggcccagcggttggtgaagatgcctcgttcgctcttctggcgctggagttgatcccggtggccgtcggatgatgtcttagaatgccgacgctctccctcgatcggtgaactgcgctttctgcggcgtcggctgtggcgggctgctgcggcttctgcgctttcgtcgagaggctcggcatcgatcatctccacctcaggctgggagtctcctgggggtggtacgagctcgtcgggcgccacttcgtcgctatcgggaacagtgactggctcccgggtagcttctggttctgctggtgggtcttcagcggggaggtctctggcagcctctggctcagggattggctcctctagcggtgtctcaggcattgcctcttccggcgttggagtctcggctgggactgcagctgcggcctctggtgtctcagctggggcctcgtccggaacaactgtttcagccaagggttcctcaggtgctgggatctcagctggggcagcttcgacaggagctggctcttcgggggttggctcatcagcaggtgcttcctctggaatctcctttggtacctcatcgggtacgacttccggttctgctacgggttctgtaggtgtctcggtagcgggcgcttcttccactggtgtctcttccactggggcgggagcaggtgcctcctcaactgctggttctgggacaggagtctcctctacagcagcggggacatcttcggtcacttctttcacttcagcggcaggctcttcagcagctgcaggttcaggctcagcgggagtttcagcagcaggctcagtgggctcagcaggggcttcaacaacaggctcaggctcaggttcagcagcaggttcaggctcagcagcaggctcaggctcaacaggctcgggagtgggctcaacaggagcttcaacaacaggctcaggttcaggttcagcagcgggctcgggagtaggctcagcagcaggttcaggctcagcagcaggttcaggctcagcagcaggttcaggctcagcagcaggttcaggctcagcagcaggttcaggctcagcagcaggttcaggctcagcagcaggttcaggctcagcagcgggctcgggaataggctcagcagcaggctcaggctcaacaggctcgggagtgggctcaacaggagcttcaacaacaggctcgggagtaggttcagcagcaggctcaggttcggcaggagcttcaggctcagcagcaggctcgggagtgggctcgggagcgggctcaacaggagcttcaacaacaggctcgggggtaggttcagcagcagtttcgagttcagcagcgggttcgggagtaggatcggcaggagtgctttcttcgactggtgcctctttgggagtttcctcgactgtttcgggctctacagcttccaccttgccctccgcagcagcttcaggttcggcagcaggtgttccctcaactggtggttccttgacaggttcttccggagcctcttcctcttctgctgctggtgcctccgttgtttcaggtgatggttcagcctccggcgttgactctaccgctagctctggctcggcggctgattctggttcaggcgttagctctgccgctggttcgacagctggttcgggttccggcgttggctctggatcagctgccttagcggccttccccttcttgcccttctttttcttactcttacccgctgccttttcctctgcaggtggctcctccgagggtggctcctctatgggtggctcggctgctgctggctcttctggagctggggcatcaggaggattatctacgggctttnnnnnnnnnnnnnnnnnnnncgctggctctgccgctggctctggctcggcggctggttcgggttccggcgttggctctggatcagctgccttagcacccttgcctttcttgcccttctttttcttgcccttacccgctgatttctcctctagctttggctcatctacggatggctcgtctgccgttggctctgctggggctgggacatcagggggattatctgcaggcttttcgggctcggcgtctggctcctctgtgggtggctcggctgctgctggctcttctggagcaggggcatcaggagaattatctgtgggcttgtcgggttcagcttcaggccccggcgctttttcggcggctggttcgggcgctggctctggatctgccactggctccggctccggctccggctctggctctggcgctggctctggcgctggcgctgggtcggccgctggttcgggttcgggcgttggctctggatcagctgccttagcggccttccccttcttgcccttctttttcttactcttacccgttgccttttcctctgcaggtggctnnnnnnnnnnnnnnnnnnnnnnnnnnnnnnnnnnnnnnnnnnnnnnnnnnnnnnnnnnnnnnnnnnnnnnnnnnnnnnnnnnnnnnnnnnnnnnnnnnnnnnnnnnnnnnnnnnnnnnnnnnnnnnnnnnnnnnnnnnnnnnnnnnnnnnnnnnnnnnnnnnnnnnnnnnnnnnnnnnnnnnnnnnnnnnnnnnnnnnnnnnnnnnnnnnnnnnnnnttgcatcggctgatggttgatcttccgttttagcctctgggtttgactctgctggagtttcggcagcctctgcaggtgtttcatcggcctttggtgcatcttccccattctctagagcgtcttcggcggccgctttagcatcagcctctttctcggctgctactgtctcaggatctacatcaagatcaagatctgggaaagcttcgtctacatactgtcagctttgtaaggactaaggtaaatttgaacactgaccatcgttgccgttatcgcctgcttttttcgtgtcgtcgcctgctggagcatcttctccaccttcgagttttgcatctccttcggattttgcgttctcttcagacttcgcactatcgccaggcgctgcatcgtctccgggttttgagtcgccttcagactttgggtcttcttcagactttgggtcttcttcagactttggatcttcttcagactttggatcttcttcagactttgggtcttcttcagactttggatcttcttcagactttggatcttcttcagactttggatcttcttcagactttggatcttcttcagactttggatcttcttcagactttgggtcttcttcagactttggatcttcttcagactttggatcttcttcaggctttgcttcctcttcagtttttgtatcgccttcgggtgctgcaccatcagcaggtttagcatcctctgcgggtgtcgcatcttctacggcagcctccttagaagcctcgtcgggatttcctgcatccggtgctggctcatccttgccctcttctttagattctgaggcaggttcgtcgggttgagactcggctggtgcggcctctactgaatctgagaaaattgcgagttaatatcaagtacaaaaggtagaaaatgaacctcatctatagaaacctgaggctgtacttacctgtgggctcagcggctgcgctatcatctccacttggctcagcggagggatcttcagaggcagggtccttctccggttcggcggtttcgggctccttgttgtcctggttttggccctcggtcagatcggtcgttgaataggtgacagggtaaaaatggaaagaattagtctcatagtcaaaggtcgtatattgacgttcaaccgatgcatatgagaactcagggatctcggcatacttgaaagccatcttcaacagcggctgctgccgggtccagggcagagtctttattctcgagttcagggggtggcgcggaaccggcgggagaacgattgttattattcttattgttcttcgtcttcttcttcttgggtgccattatacccggtcaatgacgtatcatatatcgaggcctaggcgaggctgactggcgcgtgatgtgacgagaaccgggacaataggaaattgacaagtcggcttgtcgggctcgacacacggaaaggaatggggcagcaagggaaatcgaggaacaaaaggtacaaaggatggacaattgagagagtgaaactgggtagggtacctcatgtattagagtactaaaatggaaaagaaggatatgcttgtttctctggtgacacagaggtcgcattggatagtcatggtgaggcgacgtatagtagttcgtctcatatgcggtcggatgggacgacaacaaagtgcattacggtcttgggccctgaacgtcaccaatgaactggccgatagagccaattgtcattgggccacgttggtcgtcgggtctccatttccaggagtgaggtccggtgcttgattagggccgggtgagagcagtacgctccccacccgcggaaatacctgcagcaccaaggagtaaatggtgagatgggattggaaatcgcggggcagatcggtcaaaataggaaaaacagtactgcaggatcgagaaaacgggtctgttgaagtggggtggacgccatggaatgaattggtttgaaatgaatttgaattgttttggtttcgtttgcttttgggcctggatactacacactgagatgagaaatatgaattgggccgagggaacttggccgctgtacacaaagccacgaaggcaatgtttcaataggaaaaccgatgggcgacgcagaggtgatgcaggccaggcccatttctgcccaacgtgttccggtagacgcggcaaatacgatgcaggcgtagtacaccgcgggtggggagaccagggcaattaaccttcaaaaggatccggtattaggggcaaatattgggacttctagtacatgttttgcatgactggtagattcgaatcggagatgcgaaacggggtggttggggcgattgagattgtacggggctaataatggagtcgtggatactctcgtggatagttgaatctccactctcgacaccgacacttcagagtattgtccgagctcttttccggggacatcattctgtaccactcgactgtaagggagtcagcagttgaaatggcgatgtaatatgcagttaaacatcgtggactgcatcaacaaatctttgaagtggaagagagaaaagtggcggaacacgagtttctcgggatcaggtgatattgcgcattggacttggacgtcagattctatgtctctactgtatttccattccacctatgactacagagtacagagtaagagtacagagtatgcagatgcagtccagccgatcattactatcctcgcgtcaataccagccactcctgaaccaacccgtccgccaatcccttccaaggtttttaactttgtctgactaacaatctacaacaagttaactaaccaactaactgcctcactagttacctggtcgacagatcgtcttactttgtacggagtacaacggcttttcaccggggtcctcttctttcaaaatgacatatgtgttcaattcgaccgaaggtactcggtactccgtacctaagagataggtacaaaagccaacaactatcgagtctaaaaagagctgcatgcatgaccagggcacttttgtcttttctagcggattatcctttttgtgcaattaccgatagttatgctgtacttcctaactaatacaagtccttagtcacatcgccagatacggtcacctatgtacccaatgcagcgggccgagcatccatgccgtgttgcgtgtggttagcaaatagcagtctaggtgaacccctcgcatttgtaaatatgattcacatctgattatgatgtcgtttgtttctattcccagaattgggccatgatttttgtgttctgggctcctgggctcttcgactctgtagataggcataaacatcactttctttgccaagctttcctttgccacccaggcacttgaaaggaacatgccgatcggagagggctcgaggttaatagactcttattcgatatctgatattctatatttgatatttgatatcgcatatttgagagacaggctgtttgaagtatagcttagtaaggatgttgccggcatcgaatcttctagagaatgaccggtgtgactaccggcatcatcggatgaattgcttgatcggcaataatggcccatgggaaagcaaccgccaatatcgcttacggagtagaaaagctctgactccacagcgtgactccagcacataatcccctcaactcctctatcccaccggcgatctttgctctccctcacgatagatacatcgaatgttcgctagaagtgctggctagtcaataccatggcgtaatgaagctctgattggttgccttgctttttttcacggtgaattgatacgtgcagtattacggagtagagattgaagtacaacatgtaggtaatagcaacgtcgccagctttatcgtacgcaatcaattgcccctagtgattcaaggactcgagaatgcctggtcgaaaaggtaatggggttgaagtattcacacgcgatgaaaactctgcttaaacacatctcaatacacttcccccattgcttctgactcattcttggcttccatatgtcagcctcaagtcttatccaataggctccaactcttgtcagatacgcctcggcttatttccgatatgaataaccctacaactctggtgcaaggcgacgaatgtagctaagaatatcgcgattttgctttcatatactagtttagaaccaatcctctccttctgtaagttctgctcaaagtccacttccttcaccctgctgtcggattgcctttaggcaatataatcatttctcctcgtctcgaactgtttgccgcagattggctaaattggtttccacgctgttgactacgtcgtccgatgattccgggttccccttcgaaccatcggaatcgagcattgggcgttttgctattcccgcttcgggggtagtatcgcttttgcgcttttgcgctttcggtgggttatcgctcgtttcgggatcccctcagtaggctttgtaagcacgtaccggttctccctaagcagcttgcgcagtattcctggcctgaaaccaaaatatgtgcagtgaacttgccattgtattgctggcagtacacacaagattcctctagggtgttatatgccagatctgtccagaggaaaagagtgcaatttcatccaaactcgaagtacaagagaggacaagaaagagaaactatctgtgtgtcccgccctcccgttttatacgtgtccttcttgtaaactgtgcaaaattcaaatggtggctcttcaagcttatttggatgtagcttgggagagagcgaaagtgcaaatatagcaagtacgttcttcggcaaatgcgttccttttggatcgtcacacaactcacttgcagcttgattgcccagtaattcttctccgctgtcattagcagacagctgaggaatataatgggttctgtcatttctggttgtagtggacggcttaagtccttatatatgtaggactccttggcattatgctccgtcaagcttctagagcagacaacaatatcatccagatatgttggtggcgtttgtctttggtttattgccagcccggtaccttgtcgtctccgaaggctctatatattgggtcgggatatgcggtcccttttcttggctcgtcgggggagaggccgtttcttctaggccatattggagtgactaaaggccttctcgatgagacccagtgtggttactatattcaattagctatatatcccttctactctatgtcttgggttgcgtaccttgcccaagaacttcctcactggggttttgagcttgaagaagagcttataatgctctttagccataatctctgtggcaatgatactttcgctggccgcaccctccgcacccttgctaacaaattgcccgcttcaaattggtacgggctaccaggctgtcggtacgcgagtcaccacattggcacctgtctacctccaacacttccacggcgggtagtggaataactccgcagagatttagcgtcacaacccaatcaatcttttttcggcaatagcaacgagaaagctgtgttagactcggtcgaagttacaaagtctatctgagttacggaattccacgcagttttcgaggtcctttggcacggacagcccgcagtggccaagtgttggacaccgtccgaatttcaaaggtttggattgaccgctcgaagtctgctattggaagttgatatagtggtaaacttataggtattggaagagacgataacctacgaacatctccaggagaagcgccctgaggggtattctttcctccctttgagctgtgtagacggtgtgatccgctgttcgtccttgttcccatatggctacatattagtcctcaccaaagtgaagggagagccgttggagaagagatgggccgatgcatctaccgaatggaaagagttcatctaccggcaggttctgactgctatcagtgcccttcgagatgtgggagttctctgggcggaccctggcccccacgatgtgctttaccacgaggatgacaataagccttctgtgtctgtgatagactttgaacgcttcgagccacttcatcccgggcaactgccccatgccaacccgagatggcggctatctttggcctggaggcctatctcctgagaaattcgtgacgatacccaggaggctagaaagtcgcatgtagatacctagtcgatgtggttcaaggcctgcaccttgctatgagatgataattgaatatccccctgagttttttctcatgatttattgatatatttttctttctgtcaagggcgccggtcattatcatcctttcagttattataacacccaaaagaagatgggaatactcaaagggaactcccaagagtgtttttataaagtccctagatattctcgagccaaaccgtgcatacgataaaaacgatcatgaacgccggagatagaatgcacgagaacgtctacagacacactcttttacttgcgactacggcaggtttttaggtccatcgcgccaaccgggttttcgccgcaaggtatatatgtagtctcttaaaggtctagaaatagctcgtaccaagggtcccctacttacaatatttaggaatagttagcggttatattctaaaagacactaggaaagaccccaaaaaggtgcgatagaaagatgataacaaagtggtcttctctacgggatgtacgagcgatttagatactataggtattttagagtagggcatatatcgtgtataccatgaaaatgagcctgaacgccggagataaaatgcaacctaagtaggagacaacaaaaacaactcatttccgcatgtgttcatccaaagtctttctccacttagggccgttgattctcatcaggaagatgacagagctgcttgcgaaaccgacgaggccgaggatggtgaagatccagccattgccgatagcaccgatgatcggggccgtgacgacagaaccaacgcaggagaagatgtttcgcatgaagttgttgagggctacaccttccgaggattttttcggcatgaattcggtgagcatggtggttaccatgctgaaaatgagcatggaacccataccaaagaagaagttggcaatcatctatcagatagttagcgagtgctactgaggtatcgttgagattaaataagagttgacataccgggacaagccagaagactcccctctccgcggcccaaccataccagatcagggctgccgggtacatgaaggcgccaagccatgcgttctcacgcattcggtcttccggtcgtagtactagtctacctttctcgtcgtatcggtttgccttcctcgcctcccggtgcatgatgctgtccatccatttgcctccaaatatactgctcaccatgtagcccagcgagtttggaatgtatagcaaaccaacgatgatggtagagaagttgtatggctcctctttgaaggtatgctcaacgctgatattgagcacatagagggaaccgaaggcgatgctagcatagtacacactgagcaggacggggaggaatcggaggtagagaatgattttgagcgggtcaatgaagaccatcttcaaagtcttgagataccttgcggttgcccgaacaatctgttgcgacgagactcgactcagcgggcggtcgatatgtagatcttcctcttcaagttcagccagcacaggcttgtgcacggccaacgtctcgggaagggcgaacaagataaagatgagagtgatagcaccaaatgctgaaaggaaccataacgtgctccgccatccccaacgctgggctaggagaccgccgatgatgggtgcaaacaagggtccacacaatggacccaaatagaagatacccatggcccgtcctcgctccctgggttcccagagatctgcgatggtgccagcaccaaccgcctggacagaagcagaggcaccaccactcaacattcgcattaccacaagcatcgcgatagaatccgagatggcgcagaggcaattaaagaccacaaagagagcaaaagaagccaggtagacggtccgtcgcccaagtcgctcgctaaatgatgaccaccacaatgggaatatcgacatggccagcatatacaacgcgatcgacagattagtgatagtggttgtcgtattcaagtcatcggttacttgtgatagtgaagctgatagaatattagagatgatcagatagatacataatttgggattaaagactcacggaggaatatcgcgctacccattggtgctgtggctccagcaagagcgacgacaaatgtgatgaaccatttcattcggcgagggtatgtcttcggattctcaacctctgccaccaatgctaactggccaaacaagcctctgcgcttggatcgggcgacctcgatgggaggaccaagctccgtcaattgacgttctaggcgtggaggattctccaggtcgtcattttcttcctcggcggtattgctggagacacccgaaagggagtgaatgtcattatcaacctcggactttttgtccgctatgattgtcggatgttctccactgtccggggatgcgacgataccgtctggctcagattgcttgttcatattggatgtatgtgaagggaaagaaaggcgactcgtgccaattgaacataaaataaacctgaatcaaaaaaataaggcgcataaagctttataaaagtaaagtcaagtggagtttaacaaaaaacagccctgtgggagccctgcagatagccacttgggcaccgtaaaagcgtcgatctattcccctgatatataagatcagcaggtatgtgtaggcgcaaccttgagtaaattggatgttgttccaggaaaaagtgagagagagaaaaattccgaatgcatttggagagttggagatttgtgaccgacaagcaccgacagcgaccgagagtcataatattatctcttgcactcaagcgcagggtcacagtgcttgattattcgacatcacgctagtccacatgctatcccataaagatacaagccggcttatagagccagtcatcgttgagcgcgaatgtgccggttttccgtcggcaaatcctgaaggtgtctctccgagatagattggagacttgaagcggtctagatggacgtaaactagaatctgggagagaacagatgcaacattctgattgcatcataaagtatttaacagtcgcaatggacttaccttggctttcgcttggtatccctatattgtacttccccggatattaccttgagctgcccaggtgtgtcaataaataccccagagtcatattcttatcgtcatctaccccaccatatacaaggtatattgtagggcagatccaggtgtacttgctatgattatacaaatctgtcgttagaacagagcgtataccaaaaacaacctagaaacatctttgtacgccgcatcgcctatcttcaggtggagggctgctgcaaggaggtgattaataagcttggtgatactggcgatggatcccggaggtcaacatggcataaagacggtgaactccaccacgtccctcttgacaagaattaatcacctgaaaccacagcaaagcccaaatccaacatgaccagcccaacacaaaccaaaatcaacccaaacgaggtacaggcccacctctcccagtacaagggcgataaatacgtcgacggctgggcttccctgtgggacaagggcggcaatctgccatgggaccgaggattccctaatcccgccctggaagacacgctcgtcaatcagcgcccgacaattggcgcgcctatcgccaccgatgcacagggccagtcgtacaggcgcaaggctctcgttcctggctgcgggagaggtgtggatgtcctcttgctggcaagcttcggcttcgatgcttatggcctcgagtatagcgcggctgcgattgatgcgtgcaagaaggaggagaaagataatgccagttggtatcgtgtccgggatcagactattggcacgggaaaggttacttgggttcaaggtgactttttcgatgatgcttggttgcaggagattggtgtcccgttgaatggatttgatattatttatgattacacggtatggattcctcctttcccttgtgtgtctgtctacgttgtgatattcatcgcaaagcgggaatacatccacgtgatttgataccaataattttgtgactatttttgtccatatctcatgttcctatgttcactgttctcaggctaaccattatgcagttcttctgtgccctcgagccgtcaatgcgacccaaatgggcgctccggcacacccagcttctggccccttcgccagcgggtaacttgatctgcctggagttcccccgtcacaaggatccgcaggccccagggcccccatatgcctctccatcggaagcgtatatggcacacctgagccaccccggcgaaaaagttccctacgacgcaaagggtgtcgtcaagcacgaacctctacgggcaccgagcaaagacggcctggaaagagtggcgtattggaagccagagcgcacgcacgaggtaggccagggcgagaacggggtgatccacgaccgaatctcaatctggcgccgtcgtaactagatctgccgaaaggccgaaaggcacctagcaaaaaccgaagacaaaaatagatctgcaattgcacagtcgggtccattgaaaaggccactgaaaaggccaagacagaaatgagatagcattggtctgagtggcttaggacttcttcacaagggcattgtagtgttcgccgagtccgtaggtgtggcggtagtaagcgagccagataacgcgcttgcgcttctcctcctcgtcgaagctgtcgctgtcaccagactcgatcttttccattcgtccatccttctgcacaacatttatttccacaccgtatgctcgggcaatcgcctgtagctccaactgccctccccactcagcggtcaatttaatctttcgagtgtatgactctaggggctcttccatgaacgcctcgaagtcctctttatgttccataatgaaatctgccgtgacagctcgaacagcccggtagccatcgtgttgcggagaggcgactgtgtcgatccgtgactgtgtcgcgggctggaggacgattcggcttgggtccggccgcaagccgagtccggactcgtcgagttgtttggcaactgctgagtagagacagtgcccatccggagtcacttctacttccttcagacccagctttttgaacacagcatccatgacctcctgttcattgcctctgtagttcgtttgcgtcgcggcttcttctgctgcggcggctgactgggcggcttgctcagctgcacgccgcgcgagacgagctttttggcgatttggctttttggaattgggtgtagaagaaggttctggggtaggttcggctgctggttctgctacttgcggctcctcggtggggttgtcttgtttcaagtctccgtcatctgccgcttgatcatcttccagactgaggtctgcgaggtcttcggcgggatctccatttaattgtgcgatctcggcttgttgtttctcggacagatcgcgctgcattcgctcgcattcatcgttgattcctttccgagttttcttggtggcggactttttcttttgcgtgacccgtccttggagatctttttgctctttgcggtgttttgacaaaaggtcttccattgtggaataacgaaacgagaacaaacttcaacaattctattataacgggggtatatgctatgaatgaagacaaccaaaacacctcgaaccccgcggaaccctgacgatgcagccctaagttaaaccccaaagaggactagtgtctgctccacggcataaggatattccaggtccgtgtgccatcgtgtacctcggttgattcatcaagtagtctggcctcggtagtctggggtagggggtaggtgggacagatgtaacaaatatagacttctctctttgatattcttagtgtattaagtctaaatcacaattacacaatggattccgcaagtcttttcaacgtcaaggtcagatcacacgtattctacctctccgaccattctaacgcgctcacagggcaaagtggtgctggtcaccggaggagccaaaggcatcggtcgcatgatctcagagggctatgtaacaaacggtgccaccgtctacatctcgtcgcgtgatgccaaggcatgtgagcaagcagccaaggagctcaatgccctgggcaagggcaaagcctacgcgattccggccaatttctataaactcgaggaagtgaagaggctggccgaggagctaggcaagcgcgaaagcagtaagacaccacatccaatggagaatcatatcatttctgacaagatgtctctttcctagagctacacattctcgtgaacaactccggctcgaactggggcgccccctacgacgaatacccatccgaggccttcacgcgagtcctcaccctcaacctccaccgcgtcttcgatctgacccagctcgtcacacccctcctggagaaagcggctacaccggaggatccttctcgcattatcaatatcggtagcatcgatggactccgtgttccctcgctcgagacattcgcatacacttccagcaaggccggtctgcaccacttgagccgggtgcttgccaaccacctgggcaggcgaaatatcacgtaagtatacattatatgcttcacctctcttcgtttgatgtatcgagaactgattcaatttgcagctctaataccttggcctgtggtccttttgaaagtaagatgatggctgctaccttgaagacattcggtgactctatcaaggctagcgtgcctctgggtcggattggaaccccacaggacgtggccggggcttgcttgttcttgagtagccgtgccggtgcgtttgtgaacggcgcgactatcacactcgacggtgggagtgccgtctctgccaggttgtaagcaatggaggatatctgtaaatagctgtgttagcataagcattattggtgttcctagttagagaggactgaattcgggagagaatccctgacattccaatcaatggctggttaccatattcgtccaagggacaatcttgttatgagtcactaccccagagatttgcaaaattcatattcgcctttttatacatcgcacctcaagagtctcgccttcaaattgttatctcaaggcttatcaggcctggagcggcgacataagtggagcggcgacatcatcaatgggaatgcgtcattgcctttccacctctgccaggcccaaaacatatctttctatcaagttccccatcagtaccatctcgcatctattctcaagcttcatcaacacattacttgcatctgaaatcgtcttaatcgccgaacaaggatcccccgccttttctgactgatcgcaagtatcatcgaagtacaggatacaatttccagcatcatatatcagacccgttggagcacctgttcttgctgctttaagtttctcgactgggaatagtcggtgtggccgctttcgtaacgcacatttgaatttcaaattgtgccctctcttcttcttccgccacacagaccatgagctcgtcagatgggcatactcggtccggttctagctccactgatccctattccaatccagatgtctactatggcaaggaggataatatcaacaagttcaaggcgcgaagacgtgcattctcggtggtaagcagccacccctgaacagtaccccgcggtacaaggtacatcaagcttatctttgactgggatctacagggtctgaatgactacagccgcgaagacatcaataacttctttggaaccttgccctctcgacgcggtagccacggtatgcttgttataaatatgtcggatatgcggtcggtgcgaaagctgacagcaggacagatgaggcatcgggacaacctcggaagttccttatcgaggtggacgagacgcttgcggctcttttgaagcaggaagatacagaccaaaatatgcagatcaccatcgaggatttgggacccaaggtacgctggatggtgtcaaacacaaaaggaccactactaatcgatgtaggtgatctcggtcggaacagcagcgtcatctggacataagcgagtcgacgtgcggggcacatacatgctctccaacctcctccaggagcttacaattgccaaagactacggtcgcaagcacattatccttgatgaagcacggctgagcgaaaatccagtggcgcggctatctcgtctaatcaagaactctttttggaatgccctcacgagacgcatcgatggctccaacatcgaagtggcgggtcgagaccccaaggattggactgcggacccgcgacctcggatctatgtcccgccgggtgctccaatgcagttcgaatactacgagcggattgcgaaagaacgccccgagctacgccttgatgtgcagatgctgccggctgtaatcacgcccgagtatgtgataggactcaacgacaagcccggcctccttgcattggctatgcagaagaagctcaacgaatcgaccggggagactgatctggtcggtgtgccgttcgtagtgccaggcggccggttcaacgagctgtacggttgggatagctacatggaatccctgggactgctcgtcagcgaccgcgtcgacctcgctaagggcatggtagtcaatttctgcttcgagatcaagcactacggcaagatcctgaacgcaaatcgatcttactacctcactcgctcgcaaccgcccttcctgaccgacatggcactgcgcgtctacgagagaatcaaaaacgagcccgattcaaaggagttcctgcgcaatgctgttctcgctgccatcaaggagtacaacagcgtctgggtgacctcccctcgcctcgatccagagtctggtctgtcgagatatcgccctgaaggttggggcgtgcccccagagaccgagcccactcacttcgtgcacattctcactccgtacgcacagaagcacgggatgaccttcgatgaattcgtcaaggcatacaacgctaggactatagtggagcccaaactcgacgagtacttcatgcacgaccgagccgtccgcgaatccggccacgacaccagctaccgctttgagggcgtgtgtgctaacctcgccacagtcgacctcaactccctgctgtacaaatacgaagtcgacatcgcacgaatcatccgcgtgcacttcaacgacaaacttcctatcccagcagagttccgcacacccaaaacccaggacatcgaaaccgagtcctctgcagtgtgggaccggcgtgcgcgcaagcgcaagcagcatatggataagctcctctggaaccctgagaagggcatgtacttcgactacgatacagtcaagaaggagcgcaccgaatacgaaagtgccacaaccttctgggcaatgtgggctggcctcgcgtctcccgcgcaagcagctattatggtcgaaaaggctctgccacgcttcgaggcgttcggcggcctggtctctggcactgaggagtcgcgcggcgcagtgggcctggaacgtcccaaccggcagtgggattacccatatggctgggcgccgcagcagatgcttgcctggaccgccttcatccgctatggctatcaggaggaagcggagcgactggcgtacaagtgggtttacatgatcaccaaggcgtttgttgacttcaacggtgttgtcgtggagaagtatgacgtcactcgtcctattgatccgcatcgggtcgatgccgagtatggcaaccagggcacggacttcaagggagctccgcgtgaagggtatgttcttgtccttactttctttcttttgttgatacttgggtgctaattcgaaaatacagattcggctgggtgaatgccagttatgtctatgggctggagattctcaatgcccatatgagacgcgccttgggaactatcactccctatgagacgtaccataaggcagtcgttgctcagaatgcattctgattgaatttgggttgctcttacagtcaaaattgttgcacaggctaaaagaggatagaaaattcaggtagaagtgagcaagatatttgaacatggtcatcaatccggcagtgtttattgtctagcgctagttttcggttaattcagtcttttcgtttgctaaaagaaggttgataaaataataaaaaagaatgggcgtcgtatattctcgactcacagcatgtgccagtagatgtacgccgtactgcgtactccgtatgcttcatgcaccccgcgatctcgttataacgaacccggtgttgacgagtacgaactggtaccggcgctttaattaatccggcgtaataatgaatttgccccttactaaccggcccttacatttgttaccaaaattacagaccctggcaagcagggccggttagttacaacgtacgtattggtccacttacatgtacgctgagtcattccacgacgaccaatcagaattcatggaataccgcgatgatccatccccacttccaaggttcttaaagctcggtccacctctcacaaggtcgctctccaggactagcggcgacttcctcttcgggagaaaatcagccaatggtgtatagagcttttccaagagttcgttgagatgaggaaatgaccgatattgaaggaaagcgttattagtaccttttcagttcataaatttggaacccaaatataaataatatatgggcccttacaagaaccctccacgtaatgaacatttagtcatgtctcagttggtcctaaataaataaatccggagtgggtttcgctgttcttaaagtaaatggagtccccgccaaatgagcttgagtgcctggagtaccccagaaccccaacccgaaccaaaggcgaaaataagccgatagatacctcggcagaccaaccagggctccgaccgaaaaaagaccgcatttcagagatcccgaaggcgtcatggctctccagatcgaaaattgacgggtgcggagttggggatccctcgttttcccgaggtagttctcgtgtctggggctgaggaattggtatggatgtatggatgtatgcacttggttctggtcatttatattcttgttgtttgtttgttttttttttgtagggggtgggtgtggttgttggttgtctcgttaagcttatctcatatctaatgttcatctataggagagacacgcgactcttcgggtgatgagtgtaggtacgatactagggatgttttctggaaatcttctagagaagatctagagatactttggttcatgttcttgttctagactctactttctgttgtacattccgtacagagtacggagtggttgttcctgatctaccagtcttatcggctctggatgcggatgcggttagtttggcagagctcagttgtgccgaggtccaactcgtaaggcggtttttgagtcattttcccttcgatcaacagggtggaccgcctgcgattggatagttcatttagaggtgtcatgtgttccggtctgatttcgtggagatgctgatatgcggtgatattcggcatatatagcgtaagtgtaatatagtgcaagtgtacaatatagtgcaagtgtacaatatagtgcaagataactgcgagtatgaaggattaccgcgaggatgtagactgtatagcttcgagactatagaacttgatctacgtctacttgtgtgcgcaccacaacaataaacgccgaaaatcgccaaaacacattccatggtaggaacactcaagtcaaagggatcttgaggatttgcctggtggatacctttcgaataccggggcatgacaaaacagcaaggatgactcaggcagacctcgttcccaaggttctgggcagcttttctctccgaatggcgattcttgcaattggccagacgggcgtgatattacggggagttcctagtctatttgaaattgtattattgaatattattccccatgaacattgctccgaatgcagtcgatgcacgtgaaaattagcttacgatatgtcccgtattgtcacggtcatggcatgtgtcttcgacgtcatccggccatctccacataaaatcgagcattcaacatctcacgccaacgtggaatcgagggggaaacgagaggaaaaagcacatggaatgaaactccctcgacgttccagtgagatgccgattattgtgacactaatggcagatttcgaaaacccagtggcaaagggttgtcccattagaccgaggatctgagcctggatcctctcttccgagacccgccttccgcctttcggagcactttgcccgtgaaagattcctgaatgattggaacccattggaagagtgcctaggcattgcgaggtattcgcctgactcccggtgagccgagcgtttaccgactgtgacgcatttgaatgtttaataagtaccccgggttttctggcttgtccgtttcctcttttttattatagcttctcttctcttcctcctccctctatatcccttcctaccttgcttcattctatattcgaagcttcagaacagacgtgacactacctgcacgcctgaatatactatctgactatatctttactatctttaccctttttctgtattataccaaaagtcatgggtctctacgaagatgaggaccgccagttcgcggcagaggttcaggccgttcaaaactggtggaaggactctcggtggcgctacaccaagcgccctttcacagccgagcagattgtggccaagcgtggcaacctcaagatcgagtacccttccaacgtgcaagcgaagaagctctggcgcattgttgaatcaaacttcgagaagaagcaggccagctacacctacggatgccttgagcctactatgatcacccagatgtgcaagttcctcgatactatctacgtctctggatggcaaagctcctccacggcttcgtcgaccgacgagccctcccctgatctggctgattaccctatggtatgttgataatacgatatcaaaagtgtggatgtatacttacaatcattctacaggacaccgtgccccgcaaggttaaccagctgttcctggcacaactcttccacgaccggaaacaacgtgaggagcgtgttactacccccgcagcccagcgtggaaccgtcgccaacgttgactacctgcgccccattatcgccgatgccgacactggtcacggtggtctgaccgccatcatgaagctgaccaagctcttcattgagcgtggtgctgccggtattcacatcgaagatcaggcccccggcacaaagaagtgtggccacatggccggcaaggtcctcgttcccatcagcgagcacatcaaccgtctggttgccatccgcgcccaggccgatatcatgggctccgacctcctcgccatcgcccgtaccgactccgaggccgccaccctcctcacctccaccatcgattaccgcgaccacgccttcatcgtgggctccacaaaccccaccatcaaggatctcaacgacctgatggttgccgccgagcaggctggcaagaacggtgcccagctgcaggccatcgaggacgaatggaccgcccaggccggcctcaagctcttcaacgaagccgtcatcgacaccatcaacgccggctcccacgccaacaagaagagcctcatcgaccagtacctcgctgcctccaagggcaagagcaacaacgaatcccgcgccatcgccaagaacctcaccggcgtcgacatcttctggaactgggattccccccgcacccgcgagggcttctaccgctacaagggcggcacccagtgcgccgtcaaccgcgccatcgcctacgcgcccttcgccgatctcatctggatggagagcaagctgcccgactacaagcaggccaaggaattcgccgacggcgtgcacgccgtgtggcccgagcagaaactcgcctacaacctgtccccctccttcaactggaagaaggccatgccccgcgacgagcaggagacctacatcaagcgtctcggcgagctcggctacgcgtggcagttcatcaccctggccggcctgcacaccaccgcgcttatctcgcaccagttctccaaggccttctcccagcacggcatgcgcgcctacggcgagctcgtgcaggagcccgagatggaggagggcgtcgacgtcgtcacccaccagaagtggagtggtgccaactacgtggataacttgctgaagatggtttccggtggtgtgagcagcactgctgctatgggtaagggtgtgaccgaggatcagttcaagaactgatttgttcggtgcggctcatgttgataccctgatggttttggctgtctatctctatatatgtgcttgatgtcttgtgtatgttgattgtggcgttttcctttttgtttctatggtcttgacttgattccctgtcggtcttgctctcctgttggatgagtgggggccgatttattttgcattttggaaatcacgacataattgatttacatcttgaatgaatgtgacttttttggtggttatttaagttatagtgtaaacctagagggaggatgttcttccgcgttcaaagtataaattagtgctgaacaaggacacctagcaaagttaatcattattagacgggtggatatttaacaaattatcattgaagatggataaaaatagagaagttagcgccccataaaggaccctaaatatatattgtctattaaatatataacacttagcgaacttgatttagttaccctagaagaattgccataatcaagaaatagagcacatttagagtcaagcacaaggtgcatgttcaccggtttaataatagggatgtactagtaaaaagacataacaagaatcatcggatcattgaattaggacataagaaaattgaatgaagaatgcgcccctccttccaatatcagtcgctgaaatattcatcaaggagtcagtaagtggtctccagccgtcagacgtgcaccagcaccgctgggcaggaacaaattagttaatgagctttacgccatatcccgacatgcctcaaggtccgaatctcacactcgaagcgagtagagcgcttgttaggagccttttcccatgcatccgtcgcttgcttgcgcttttgatttggcgacaaagattccaggggaggccgtggtattttttggagctgtgctcgctcaaagtcaatgaacattacccgaccactgtccttattccagaccatgtttccggcgattggatcattgtgaagcacgcccaatgcgtgaatagcatgtagcgagacttcggcttctttaattaaccaatctggttcaacatcgtgtggcttagccagcgtcttgcccgcataccccatcaacgtcaaatgtacaatatccgcgatgccgtcgtaagagaatggttgacggagaggtaagccacccagtacaaccggcacgtgcaccccctgtattggtcgaagacgcgaatacacactttcctcatgttgggcgtatttaacgaactcgactggcacccctttgccaacgaaagtatacccgtgagacagcaatgtcactttatggagggctccgcgtgagccatgaatatgcaaggaatcgcatcctatctccaagtcaggccgcgggtcatgcatggagagttgtcgatggaggagactaatgagtgtcacctgactgattgagtgtcgaccaactccatgatcccgcacattggggcatttctcatctaatcttcctctcgtgaccaagcctaagaggcactgctgtgtacaatactggcgagatttgccctgtgaggaagagcctcctctggatattactgtagttgatgatggtggcaagggtgaagaaccggcgaagcgggaatcccggggccttcgactgggggtatttgagtcgaattcgtcggaagaatcatcaaacccagacgaactcggaacctccaacggaacgcaggattcaaaaagtgcagtaggcattgatcgtgtcttgacgggagacatacgacagtatttgtttctgctctttggggacatgaaatcggaatctgaacagggtacatccttcaccttctctgcttcctcccaaaggtctgcatacaccattacccatgtgtccagattttttgctgccgagtttctccactgaatacttcgcggcggtgtttgcaaagctcggagggtaaaggccaacacctggccgagtgctgtcaagtgtaatctgttatcgtcgcctgtgttgccggtccatccagttgtatcaccaacatcttctttcggcagcgatagataatagtacacggtggaaggatcatcgtgtggaacacgaagaaatatgaatgcttcgccggtacacacatatccatactccagccctgctttgatcatgtaggagaacgcctgtgtgatgactgcagccacaacgcgccgacaagtatcttctggcttctcaacttcctgataacaaagcacgtcgtcgagctctatgtccgagagcccagcctttatatgagcaagcgtgagcttatgtggcgctttgtattcgacaatgaaggcagggaccctttcttcggggcctttgttgtacacacagaactggtccgctcggggtctagagggctttcgcagcataggattttgatcattcgcaactgactgagccgtaagttgaagttgagaagtatgcgactgttttgcggctaatcgctgtgagcggcgcggttgtccctgcgtcaagctcagagatcccatatcggccactatctctgattcgtccgtcaatgtgttcgcatggttttcgaaggtcacatccccattgaggtggaagactcgtcggagttgaggacttgcatacagcttctttatgacctcggcgacacgcaattcgatcgtgaaccgttcaaaatagccgagatcgagctccgagcccatcattccttgaacatcttgcccatatcgctctagcgtatgcctcggcgtaaagtggcgctggacgacaagatcaacgcacatgagattatcccatatagttgtctgctcctgtggaaattccacccactctcggatcctagccgggcgaagcttattgtctgcatttgccgggtcgcctttggtcgatgaatctatacaggtttgtacattcatgccaagaaataagtgaacatggcaagcatcgagaaactcgggaagagtggtatctcgagtctggatcctttcttcacttagttgacgtcgggtctcggcctcgcgttgtcgagcttctgccgcaagttgtcgagcttctgcctcgcgttgtcgagattctgcctcgcgttgttgagcttctgccagaagtcggcgcaactcggatacgtctggctccatttctggcgaattcttccaagatgagatacagagtgagaaactcgatgaagggaaggaagggtgaatttgtgtcgccttttctaggtaggagcgagcaaacaaagtaacaaccccgctttcccttagccaatcatatcccgcatagtcgcatagtaagtcttgggtggtttgtgatgcttatgttgtagaaaaagagaagagatggatacggtgtctttctgggtctttctgggtctttcttgtcttttccagtatctttgttggatattgttttgtcgggtcactcttatagacagaaaaatgcaaacagtgaaccccaaaatagtgaaaaaggagtaagatacccgtgttaaacagacagggatcaagagatatagtcacatgatttatggtgaacggctgcttacgtgtacaaaatagcatcttgaggtccaatggatggatcgcgattcgcgataatcccgatatttcattcaaagcctatcagatggtgccacttctgtagaatctacttgtactccgtactcagctaggaatcccacaatctatccatgtccacctccgaaatcaaatgatcgagtacgcaattagcacgctaattatctgtgacgatcataagagccagctggacaaagttcattatgtacagtaatgtagtaagcgagattctaggcaaggaactgatatactgtagcacgactattggcgattgccctccccgtctagggactacaataatatagcaactaagagtaccaagcttaagggcctatacccccactaccaggtatcaaagttgttatcatagggcacagaaagcgcctgtatactcctggattaggtgggagctggttgggacatcggctgaagaatgtttgagacaaaattgtgccgggcaaaggctaattatctacttggaattggatgtcgatcgactattattgttctcgtttactttttgcagctaatgtatgtacagctgaaaattgcggtcagtagagttggcaataactccatgcattgctatcttttgtggttgttatgctgtaaatatgtttactaaattcccccccaggactggataactcactaactggaacataactaaatatttctctaactacatctagttagtcgaccaagacggcaccaattaataatcaaaataagattggctccactttttaattcgtctagaacataataggattgcaggaagcgtcatgccggtcatactctagcgcacttcgtgtgaagccgcggttattctttatctcggcgtgacactcaataccggttagcccttggatttatgtcctcaaaatagaataaacataaaaaggaggcatcggtaaagaccaaaacaaggaatgagccgagagcttgggacaagtgcggggccttcacctaataggggtacggagtacggagacatggcatgaattatggagacatagacatacgtacggagggatattgatatcagagtggtggaatttgcctaggtaaaattactttaggtatagccgttgtagatcccattatgctattatcggggcccacatccacttatttatataatatccgtagacaaccgctcactttccacctctctttctaaccttaatttatcttaatttatcttcatcatggtcgaactacccgaatttaagactgttccgctggaggagattcctgtgcgcgtcgccacggcccgcaaggcgtttaatgagaacaagacccgtgatgtggagttccgtctcgtccagctgcgcaagctatactgggcgtgagtactgggttcttttgtcttcctggtcatttaactaacagttttacagtgttaaagataatgaggaggccattatggaggcctgcacccaggacctgaacaagcctcggttcgaaaccaacctcgcagagagcgggtggctcctgaacgacattgtcttcacgacgcgcaacctgcacgaatgggccaaggatgagaaggccaacgatattgatctcgccttcaagttcatgaatcccaagatcagaaaggatcccctgggtaccgtgctggtcattgggtatgctacccccatcctccacgatgcgcatgagaataccccccgaaggctaacaagactcttccctattccagtgccttcaacttccccttccagttgaccctcggccccgtcatcggtgctatcgctgccggcaacacagtggtgatcaagcccagcgaaaatgccccccgcagcgcggccgtcatgcagaagatcattgaggagagcctcgacccctcatgttacatggtcctccagggcggcatccccgagacacaggccttgcttgccgaacggtgggacaagattttcttcacaggcggcgccaacgttggacgcatcatcgccaaggccgctgcaccgaatctgactcccgtcgtgctcgagctgggtggtatcaacccagccatcgtggccaagagcgcggacccgcgtctcgtcgcccgccgcttgctctggggtaagctcctcaacgccggccagatctgtacctcgcagaactacctgctggtcgaaagatcgcttgttccggcggtcgtacaggagttcaagaacgcctacaaggagttctaccccaatggttccaagggctcctctgattacgcgcgcatcgtcaacttgcctgccttcaaccgcctcaagaccatgcttgataatactaagggcaagatcgtcatgggtggcactatggatgagaaggagctcttcatcgagccgaccgttgtcctggtcgactcggttgaggactccctgtgctcgcaggagagcttcggtcccttcatccccatcttgcctgtggatagcctcgacgaaggcatcagcgtggccaatagcgtccagagcacaccgctaggtctctaccccttcggtaacaaggctgatgtcgagaagagtaagtttccattttgttttcagtctatctgatctattctaaccctctctcctagttattgcttcaacccgctccggtggcgtctcctgcaacgacgccgcgctccacatcccaactctgccctttggcggtgtcggcgagagtggccacggtgcctaccgcggccgcgccagctttgacgtctgggtgcaccgtcgcaccatcacctccagcccaagctggctggagggcatcctggctatccgctaccccccgtatgccggaaagatcagcacgttcaatgctgccagcgctctgagccccgactttgaccgcagcggcaaaaagctgggtatgggcttgctgcgctgcatcttcactttgggtggaggtagtgcgaaggctggagccttcagggctactgctcttgctgccagtaagtgatcctttctaattttctttctgttcttgccaaattcttgccatttctgtggatattttccacatcttgcacaaatccgtcttgtgggtgggtccggtcaatattggagaatttttttcttcagacgaggagaagcgaattccgagatccctacaccaaccccgtggctccttacatggttccaacgacgaagacgcataatctctgcctatcccatatacccctaacctcatgtgctggcttgatcccgttctctccacgccgaggatgcccatcttcacgcttctcttccaatcatttcaacccgcagatcattatcatcaaagcttttgaaaatcacagtctaaccattaatagttgcctacgtcgtcctccagatcctcgaacgccgatctgcgaaattgtgaacgtgaacatgaacatacgtttgcccctgaacttggataccccgcttacgatctacggtcaatcactccttattttggtatggagaagttgggcttcggcttggattaggatgtgtggatgacttcaggatctttttgctatagtgccacgtaaataaatttgccatgtaggtaagtatgtacttgttggatttagttgctctttttacttttggtgattgatgcttttgttacgaatatttgagagctatgtatatttgtaatccattcaagtctttttttgctttcgaggctttttaccctgtagtgagtgtgtagcttatctagacatcaggaatttggaatggctccaattggagccatacatcccaaaattgggaacaacaagaaccccactagcctacagcattacaaggtacaccgctcattgagaatctagacagatccaacatttatatcatcattcgtgctgtcaaatgcagtgattgtcaaatgcgctatccaatcagacaaatgcctcggttcatctagctagccgaaaaaggaattaagtcaagtacattggctctagcagcgccgttcaacgccgcgattactcacgcacaggtacttgacacccttgtatggcttgacgccctcgcctaagccgcgactgcgacgctggtcgatgttgagactttccaccttgataccagaggggagccagcctcgcacggagaaggataccgacgccgagttaggcattaggcttgcattgacctgggctttggttctgcgtggggtgcgggatgtagatgatggagcgaagaacgcggggaggtgggcgttatcctgggattgtgatcggagagggggtgtgggagttttgtgtatggagggatttggggatggggtggtagctgcaacggggtcttcttccgcgtcttctggttgtaaggcagcggaacgggaggatttctttgtggacttcttcttcttctttttgcgcttggaggggtctgaggatcgagtcttctttgatgtgctggcagatgcatcgttgtaggaggtaggcgcctcgtaatagccttgcaggaggttggcattggcatcttcgtcggcatcctcgacactgtcatcaaggtcatcatcagctgatggatagcccgagaccccgcaacgcagtgtggcagttcctgtcagtgttccggcatccttgccagtgggaacccgccattcgaggagcccacttgagggggagaattgagcgtcaccacggctggcctgcatgtccgtgatatggcggacagactttgagatcggtacgctgacgacaacctcttcaagggccggtccggagcttccacttccgcctccgcctaggaatgacggtgttgatgtcccggatccgcttcgggtagctccaggccgggaagagctttggcccgggaaatttgggttcaaagtcagccgaacctcaaattcagaaccagatgacccgagtgatttacggatatccacaatagcaggtaggaaaagcttttccatatggcttggtgcctcatccagatcaggatctatgggaaggagatccacttcgtacccagccaggataaaccgcccgtcgggaggtatgaagctgagctcacccggccgttccttccatcgagccagtcgaacacatggatgaaataccggtagttcgatcttgcgaccaaggacatgctggccaccaggcgctgataacgatagcagtaggtccgggactcccgatattttcgcagtgaatgcaatggtcccggataccaatgcagacagcagtcgtcctgaaggagccatagtaacagagagggattcaatgatgtcgacatatagctcattagaggtatgtcgtacaccgggccgtcgccaaggaatggcgggtccttgtgatgcactgccggcagcgagagattgcttgagaggattggtagatcctagcgttggcgtagatgtactaaatccaggcgaacacattaatgccagataatatcgtttatcaagtcaagactactcacccaatcccacctagcagcttccccatccacccgggaacctcaacaacctcctgtaacgcattgggttcggtattgcatactattcctccatcgcacatttcattaataagctgcgcaacaacatcataattggcctggatcttagttgagagcagcggtgctccaacaaagtcctcaagtacatcgatcacgcgatgcaggaactccagcgccagaagcggctccgtgtcgacttcgcttattgcaagaaacaacagattcgactcaactgtcgagaataccgtcaccggcggtgaagcgctaggaatgtacagcaaggaagggcgtggttcggcatgggcaaggtagaggggcaggatggcggaggccgagggcgggcgggatcgatatacatgttcgacgaggggggcgctgggaagacgggttagtgtggtcttgcaagccgacgcggaatatcccacttttgctcgtcatatatgtaaacggcatcaatctcgccgctcatggtgactgttgtctgatgatgagatccatgtgtcggcgtagattgcatagctctcgtgttttgccgcggatttccgctttccgataactttttcgagacaacaggcatcaaatcatactaaccgggctctggtggtacggtctgcgtttgtttcttgttcttgtcccgaatatattttaatacgatctaaacacattcatctcctctgaaaagcgcgccatggctacccagctgaaagacgccaagcaggctctggccgaggacaagtacgacgactgtctggcctgcagagtgactggtatgtttatttttagcccgtgattcgggctggtattacaagcatttggtactgatattcggcaacaggatctgctgcttttatgggcctgggggtctacagctactacactggaatggccaatctccggaaacaagagaaggccatcatgcaaggcccctcaaaatacaaaatgggctcgcgaaagttagggatcttttcgatttcagcgacattagtgggaatggggctgtggcgggcgtttaattgagcattttatattgaacatataccgaagcatatggatgtgacgaaggccggggtcgagcaggctgtttgatagcgaagtgcaggctggaggttttgtaagatattgattgttatttagttgcaagccaatgataattgccactccgggtatcgggaatatccgcatctatatgctatatgacaaggggaagaagagggaattggataagaaaaagagacaaaaaaagatcaaagaaacccaagtaagacagcagccaaaaagaaaaaaagccatatgcaaaaagtcccttgttatgcacccgaaaagcaccttcatacccggaatttcaaccagccactgtgtgacaatcagaagggaatggtcgtcacttcgtcatcatataatgctttacccaggggaagccctaggtaaagcggcctcgtttcccaccccctcctgacatatctcgtccgttgttaagtcctgatagatcaaagaaatctgggaaagtgaatttcctcttggacccaatactagcaggggactcccgtggcgaaatgcgcgcgttggatcgtgggtggttgttgtgacgatggtgtggccgactgttgcggggcatcaccgacacgctcacaggagcgtcttgcatggtcgcagatgagttgtctgacgactgcacatccatgtcgagctcctgacactgagggtatgtaggaccggcagagaatgtgaagacggcaggcgtggcgaaagaagatgtttcgtggagttgtgtgggaggagtgattgcctctggcttagatgcgggtacgggcactgaagtggggggctgacgagaaattgtttcgggtgtaggtttttctttgcggacagtagccggagtagcacttcggtcacgcttgtctgcctctgtatcttcatcgctgctctgtgatccagttccgtcgcatttttcagttgcccattgtcggaccttccacccctctccgtctccgagaccgaggttctcacggtcaaggaagtggagcagatcctctatcgcttcctggtatcctgatgaccttgcatgggcttgttcacatactgcattcttgtacaggtttgtgacagacagagccgccgccttgaattgctggaggagtagctccgggggttgcgggcggggtgtcgagctcggaagagaggtgttgagggacctcatggagtccatggcagggagcaatgtcaaggccctgctgggcaacgggtttgaggacaaaagtgtttgtgtggacaacttctaatgccgtgcgtcgttcgtcggtagacaaatggcgatagcgaggagcttgcggtgatgaaagagagcagttggaacgaaagagactcaaataatataacaaacaaaggccagaacagccagaatcagacaaatcaggtagttggtcgcctacctgtgcaacaataagcaccaagatgtgtcaacggaggaactttcaaggttgttgcagatgacctggcccggtaacgagaagcccactttccgacggaataacaatattccataccgtaggccctaccgaaaggcggtatcttcatttgccgtcgacgcgctttgaataccttcccgtggttcctagaattattcaatagcattcattctttaggacccccctttatggattgcttcaacctttgaattcgtcttggactatatctagacagtctccctcacctcctcaccacttcgaccgcagctggttctttcttcctgcactacgcgacccgactagtcgcgcgcttccaatattctttgttgcacgcttacatacgtgcttaaatagccagcgcacctattctgttcaccacagataaaacatggctcctgccctcgcgtctgatcctgtctcgcaggcagatactcctatgactgatacaaatgacgacacggtccccttggtgcccgtggatagtgccgacgcgcaaatgacggtatgtgaggttgtgtctactcgcttgtttagagtgaagttctgcatgatttcttatgtgtttttttgattttttttgctctaagctcatgctaattttcactttcgcaatctagagccgccaagacaccccagattatacggtaaagacacctttggtctacaacgctgtttattagagggcgttgctaattatttgataggactctgacacaaatgcaaacaccactgcaagcagcgttgcgggcgacgccgcggccgatggacgtaggcgcagatctgaggccaatcacctcagaaaaagcatcctaggcaagaagcatggccgcctcgataatacaaaggtatgggctataacataaaatttccaatggcccatttgctgatacatggtatctcacaggaggatgattcgattcgccgattccgataccttctcggtctcaccgacctgttccgccatttcatcgagacgaatccaaaccctgagattaagcagattatggcggaaatcgaccgacaaaatgcagaggcagaggaaaaggcccgcaagggtactaagcgcactgggggtgctggtagtgagcggcgccgcaggaccgaacaagaggaagacgcagagctgctacaagatgagaagcagggcggcaataccactactgtcttccgagagtcaccatcatttatccgtggtgagctacgtgattaccaggttgcgggcttgaactggctagtttcgctacatgagaacggtatttcgggtatcctggccgatgagatgggtctcggtaagaccctgcaaacgatttcattcctgggctatctacgttacattcgtgatatcaacggacctcatttggtcgtcgtgccgaagtcaaccctggacaactggaagcgagagttcgcaaggtggaccccggacatcgatgtcctggtgctgcagggtaacaaagaagaacgacagcagttgatcaatgagcgcttagtcgaggaaaagttcgatgtttgcatcaccagttacgagatgatcctccgtgagaagtcgcacctgaagaagttcgcctgggaatacattatcatcgacgaggcccatcgaatcaaaaacgaagaatcctcgttgtcacaaatcatccgccttttcaactcccgcaatcggctactgattactggtactccgctacaaaacaatctgcatgaactgtgggctttgctcaacttccttcttcccgatgtcttcggcgattcggaggcatttgaccagtggttctccaaccaagattccgaccaagacaccgtggtacagcaactccaccgtgttctccggcctttcttgcttcgacgtgtgaagagtgatgtcgagaagagtttgctgccgaaaaaggaactaaatctctatgttcctatgtccgaaatgcaacggaggtggtaccagaaaattctggagaaagatattgatgccgtcaacggcgccgctgggaagcgcgagtctaagacccgcctgttgaacattgtcatgcaactccggaagtgttgcaaccatccttacctgttcgagggagctgaaccaggtcctccatatacgactgacgaacatcttattttcaactccggaaagatggtcattctggacaaacttttgaagcgcatgcaagcggacggtagtcgtgtccttatcttctctcagatgagtcgtgtactagatatcttggaagattattgttgtttccgagactacaactactgccggatcgatggtaccacggcacatgaggaccgcatcgctgccattgatgactacaacaagcccggttccgacaaattcgttttccttctcaccaccagagcgggtggtctgggtatcaacttgacctcagccgatatcgtggttctcttcgacagtgactggaacccgcaagctgatttgcaggccatggaccgagcccaccgcattggtcaaaccaagcaggttaaagttttccggtttatcacagagaacgccattgaagagaaggttctggagcgagcagctcagaaactgcgcttggatcagcttgtcattcaacaaggtcgttccggacaacaggccggaaaagcatcttcgaaagacgacctccttggtatgattcagcacggtgctgccaacgtcttcaacaccaagggtggagatgcaaccgagctcgccgaagatgaggatatcgagactatcctgcgtaaaggcgaagaacgaactgcagagctcagcaagaagtacgagaccctcggcattgatgacttgcagaagttctcctctgagagtgcgtatgaatggaacggcaaagatttcaccgagcggaagaaggacatcggcatcagctggatcaacccagccaagcgtgagcgcaaagagcaattttattccatcgataaatactaccgccaagccttggccactggaggccgaaccgccgacacaaagcccaaggtaccacgtgctcctaaacaaatcactgtccacgactggcaattcttccctcctggtctccacgagctccaagaaaaggagacggcctatttccacaaggagatcggttacaaggctcaattgcctgaggggcccgaagaggagcttagtgacagagaggctgagcgggaccttgaacaacaggaaattgacaactctgtcccgcttactgaagaagagcaagccgagaaagctcgtatgtcagaagaaggctttgcaacctggaaccgacgtgatttccagcaatttatcaatggatctgctaagtttggtcgcactgactacaagggtatcgctactgaggtggatagcaaggatcccaatgagatcaaagaatatgccgaagtcttctggcgccgatacaccgagatccaagactatccgaagtatctccgagtcatcgatcaaggtgaggagaaggtgcggaagatagatcatcagcggaagatgctccgcaagaagttggagatgtaccgcgtgccgctacagcagctcaagatcaactacaccgtgtccactaccaacaaaaaggtctacaccgaggacgaggaccgattcttgttaatcatgctggacaagtatggggttgagggtgaggatttgtacgaaaacattcgtgaagagattcgtgattcgcccttgttccgattcgatttcttcatgctgagtcggacacccgtggaaattggtcgccgctgcactactcttctgaacactgtggcgaaggagttcgaccccagtgagggcaagggccgtggtcgtgatcgtgatgaggaggaagagatagaagaagcaccccctgccaagaagaaggctaagaatggagctgctgtaagttttgtctgatcgattatctaatgttttgggttctaacttctttcacagccgaccaaacaggtcaaggccgtcaagggtggtagcaagactgcttctgccgccagctcccgggctcccagtgctcccgcaactaagtctaaaactcgcaggagataatcgtgtggatcgagtgtccacgggtgtgtacgttgctagtttgctacggttgttattggtgattcgggtattagggacggttttgttagggatcggcgcagatgatgttttaatgtacttttgtaattgaaatagagttacttgttctacttgcaaaggcttatcgtatattttcctgtacaatccctgcatattccgaaaacccccgcctgaccggagtccgcaacgccgtgcagatcggatgccaccctggcgccatatcacgctgctgaaacaacactaaccctgagtcgcctgcaatgacggaaattcaggtttctagacttggtctcaatctaaaaaatgcctagcctcctagctagacgtcgcaatacttaaaagccatgacgacgcttgtttcaagccccagttcattgcatgataacatcccatagtataaatacttaaggagaccccgcgctctagccatccatgctcaaatttctcaaatcaaaactatccaagtcccccaccatgcctagaatcaacctcatcgcgaacccgcactaccagaagtccggcacgaagtcgtacttgtacgctatgcgcaagtatcacttcacgccgactaaggaaggcccgtattttctcggtaccaggatggtgcaaagtggccgacagtacaccaataagcccgtgggaggccgtgctcggttgcagcaggtgctgcagaagaaggatgctactagcgatcaggttgggcaagtgagtgccaacgacgtgcagaatgactcgatgtatcttgcacaagttgctattggcacacctgcccagacgctcagtttggacttcgataccggatctgcggatctgtgggtaagtggatttctttcgctcttctccgtgcgatatgaacgttgctaagattgtctaggtctggtccacggagttgccgtctaagactttgtcggcgtacaaaaaccatacaatcttcgatccgaccaagtccagcacgtataaagagaaagaaggctcatcgtggcagatcaagtacggtgatggctcttctgcctctggctcggtcggcaacgataatgtcaacatcggtgggctggtggtcaaaggccaggccgttgagatcgctgatttattgtccgagcaatttgagcaaggtgctggggatgggttgctgggacttgcgttcggtaatatcaataccgtcaagcccgagcccgtcagcacgcctgtggagaatatgatttcgcagaccgatatcccgaagtcagccgagctcttcaccgcgaaattagggtcgtggagagactctgatgagccggataagggcgagtcattctatacttttggttatattgatcaggacacggtgaaggccgccgaggcagagatctactacactcccgtcgataacagccagggattctggatgttcgattctgcctcggcgacagtgaatgggaagtcgattgcccgggctggaaacaaggctattgcggatacagggactaccttggcgttggtggatgatgagacttgtcaggccatttatgatgctatcccgggggcagagtatgacaatgagagccagggatggatcttcccatccaacacaccggctaataagttgcctgttatatcttttgctgttggtgatacgcagtttgttgtgcaaaaggaagatcttggatttgctgaggctaagtctggttatgtctatggaggcatccagagtcgtggtactatgaccatggacatcctgggagataccttcctgaaggctatctatgcagtgagtgatatattcttggagttcacaatcgcacaagctaacgataattacaggtcttcgatgccggcaatcttcgcttcggtgctgtgcagcgaaaggagctgcatcagaatctctctgtgcctccggagtcaagctaggcatatgatatgtatcatgtaaacggactgtgaattactggagtctgtagacatatttattgtgagtcaaggaagataaattactacagaatgcacttgccgctatatgagaaactgctacgattcacgaatagaaaacatgagtgggttcctcgagctggtgtgattaaccctaattcaaaacagactcgaacaaagactcaaatcaaatactccaattatgtgctattgtacaaagatgtagtgtaaatgctagaatacatagttattacagtaaaatcaccacgttttctccttcttttccttcttggcgatctcaccgacagtcatgggggttcgcaagaacttctccatcaatagcgcggcggcgacactcacattcagactgtcgatgcgggcaggatccgattcaacgccgagaatagaactttgccgggcgccgggaatactgatgatcgcatctgcatgtgacttgatatgcgagctcaatccagtagcctcactgcccatcattatgacactaggcccagtagtggagggcagtttggccccgctttgatcaccatcggccgagatatgatccatgtgcacagagccaggaagtggtgcatctgcagcatagaatcgccacccgttttgctgggatcgctgaataaaatcaacttcatttgtcacatgaagaataggcatgttttctgctgcacccgcagaacatttgattgtgataggagacattggtgcggagttgcgaccagccagaacgattgcatcgacaccgaggaaatatgatgagcggatgatagcgcccatattaccggtatcaaccactccatccaatagcaagacaattgggtatctatggcgttgttcggcctcatgcggggacggagaaggatgatggatctggatacgatcatccgtgccatttactgcagcttcctcccgggtttgtggtgcaagctccgtccggaaatattcctcggagatagatggaacagccaggaggccacgcactggtaattttggtagaggagatgcctccaaaatgcacccattgtgagggcgtccagcactcatcttgtccatgagtcgatcccaccctgcaaatgccatttttactgcaatgttctttgacaatgctagtttgcggattgtgacctttgctgcacttagctcttcctccgtgctctgatagatatagagcttgtatagttgacgccgactgcagcgcagcgccgcctctaccgcactggtgccgtaaatgaactcagatgctggtgtggtgtaggggattgtatcgggcactttgacgttctctttcacccgctctggcatgctgcgcgtgactcggtgagccctaggtcttactggctctttctcccgtggttcatccatccaaggtctttctcgtcccgattgtgcgaatggactgtcttgtgttcgcgattggaatcgtgattggaatcgagattgatgttcacggggtagtcctcggaaatcaccagaacgaatgaactcatcctcgtcgaactcaaacttttcttcttttcggctttctcgtggtgattgagacttctcattccatggcgattgtcggcggtcatagtctttacgacctacaccgtccgatgtccagggcttttttgctccgtattctcgctcaccctggccatagcttcgacgaacaccggagttaaatcccgatctctcgggcttctgttctccatactgtcgtgctccatctgttcgacggtcattgaagttggtttggtctgatctctcgtatttttgctgcccatactgtcgggatccgttggtttgacggtcagcgaaattagattcgcctgatctctcatactgtcgcgccccgtatttcccctcgtattctcgttcgcgtttaggaaaacgagtgtcgttgccgcgccgattatctctgtccgcggtctgagatctgcgaataccttcgccaattgctgaattcaatgatgcatgccgaatcgccaagaccgtagaatgcgaggagcggatcactctagaaagaccatccaggcccgttcttgagatagtactgagcatcgcgacgaagttctggtctttgcagtttcgtccgtgcggctttggagaacttcgacatcgaattgcacgatcggtatgtaccctctgccgtacttatcgttatcggatctagacgcgcaacgcgaacttctcgtgtatgccacttaatcttcccacttagtcttctcgacttcgactttgtttttctctctcactcctcttcttcatccattcattcgttccgttctttatcaatttgaattcatctttcctttgagcatccagtccacgcaaagtttgctttttttttcccattgggatctgcaatcctatcatcaatcaaatagttatccattcactgcttagcttcagttcagttgacttttcttttctctttgtaggagccgcatgtgcggttcctacgccatcccaatttgctgattcttggtccaatcggaaaatcaccatgtctcaatctagagacaattctccaggctctgatagctctgatgatgctgatgctgtggctgcacaattgctagcacagttccagagcgctccctcttgtactcctcccaccatcccacctgagggtcctgaaaatgccctccagccagtgcaacatatcactagaaactcaaaagaatcaacaatgtcttttgagatcatcgtcccagtggttaacaaccctgatgactatgagtatttgcccggtcactttgaggttcatcgcattcttgcagtcgacatgcatgagccaaagctcattgtgagactcaaaagtggtgaagttcaaactgtaagcgaacacaagtaatcaatcaatcttaggcgccgttcaactgaccatgactttcactagatgaccaccaaagatttgaaaagcctcaagaacggacgaaaggctttgcgtgaattcaaccgtgactcacagagccctgaccccctcgcaatggaccactcccccatcccacatttcatttacgcgggtggagatggtcctgcggactatgattcagatatggactggggaattgcacgaaaccgccaacgacgcgcgccgttggtctcatacaacaatttcttccgcagtgatgatgaagaagatgaagacgactatcaaagccgccgtgaagagattgactcagaggagtccagtgatgaggatgaagatgaagatgatcctccaaccaaacgccgccaacgccgccctccgagaaggggtgcgcagaggggccgaaagcaacgtgatcgcgaatggtctgaacagtcttctgcctctgatacaggcaaacgagtatcatctcgcctgcgacagacccgtcgacgcaatatgaaagaacgcttcgaagacgacgaatattctgcggttgaacctgagcagcctaagcaccaaaagttctcgggtgcgagggagcagttccgtgaactaccacaggacaataaattcagattgtgccactcccagtcatgcacccaatgcggccatggagatcatgaccgtgaaaaggggtctttggtcttctgccaaggttgtaccgtgtcataccatcaaggttgtcttggcgatcgaaccagccgaaagcacttggtcaccaaggttgacgaaggggatttcattcttcaatgcagtcggtgtttggggatcaagcaccaagagcatgacatgaagcctcatttaggccattgtgccgtgtgtagagacgaaggacccatgtcgcagccgttgcgagagactctttcttcccagactgagcagcacttgcgggaagccaatggtggcatagatccgattactcccgtggatatgtccagtgtcaacaatgtcgataatatcctcatcagatgccttggtggcagccatagctgcaagcgagccttccatattcagcatctaccaaacacggcagaggagaaccttacccacattgatcctgataactggcaatgcgacgaatgctctaaatcacctcctggtgccaatccaatccaggtgatcgttgcttggaaaccaaggaatcccgaagtcaaagtcgtctcgcagttggttgagatgatcccagagatcgacaaactatatctcgtcaagtggcacaagctgtcctacttccgtgttacctgggtgactggagactgggtctgggccaggattcctgccagccagatgaaggcgtttctcaagtcagaaagatccaccaaaccgattatgacagtagctgaggctgtccccgaagacaatctgcgagtggacattgtttttgatgtggaatatcacaccgagcctaaatcccaggaggatcgagcaaacgccaagatggtcgaacgggcatacgtcaagtacaaagggttgtcatacgaagactcagtctgggaaattcccccagaacagactgacacagctcgttgggaggatttccagaccgctcttatcgacaaagtacgccaagagaatgtccacgtcccgaagccgaaagatcttcaaagccgtctcagagatgtccgtagagagaagtttgaccagagccttcttctgactgctcagcctgcgttggtgaccggtggtgagctcatggattatcagatggaaggcgtgaattggctgctgtacatgttcttcaagcaaaccaacgccattcttgctgacgatatgggcctcggaaagacaatccaggtcatcaccctattcgcggcattgatcgataagctagactgttttccattcttggtcgttgttccaaatgcgactgtgccaaactggcgccgagagatcaagagctggtcgccacacatccgggttgtcacctattatgggagtgccttcgctcgcgagatggccagggaccatgagatgtttgacgagaatggcactctatgttgccatgtggttattgcttcgtatgagagcatggcagacgatggggctaagcgagtcttgtccagtatcaattgggctggcttggtggttgatgaaggtcagcgcctcaagaatgacaagacccagctctatgagcgtcttcgtcgcatgaaattcggtttcaagttgctgctcactggtacaccgcttcaaaataatatcagagagctcttcaacttggttcagttcatcgacccaacttacaatgcggaggagttggaggccaaatacgcaggagccctcgacagggaagcgattcgcgagctccacgacatgattcggccatgtctcctgcgtcgaacaaaggcagaggttctgccgttcctacccccgatggtgcaaatcatcattccagtttcgatgtctgttgtgcagaagaagctgtacaaatcgatccttcaaaagaacccgcagcttctcaaggctatttgcaagaagcaagtcgggcagttgaagaaagcagagcgccataatttgaacaatatcctaatgcagctgcgcaaatgtctttgtcacccgttcatttataaccgggacatcgaagagcagactctggactctcagctttcccatcggcgtttggtcgaagcatccgggaagcttacgttgctgaacttgatgttaccgcgacttcgagagcgtggacaccgcgtcctcatcttcagtcaatttttagagaacctcgacattgttgaagacttcctcactggactgggactccagtactgtcgcctggatggaaacttatcctcgagggaaaaacagcaacagatcgaccagtttaacgcgccgaaatcccaattctttgcctttttgctttcgacgcggtccggtggtgtcggaattaacctcgccactgccgatacggtcatcatcatggatccggatttcaatccaaaacaagacatgcaggctctgtcgcgtgctcatcgaatcgggcaaaagaatacagtccttgttttccacctggtagtgcgcgcgtcagtggaggaaaaaatcatgcagaaaggtaaaaccaagatggcactcgatcacgtacttatcgatcgcatcgaggccgatgaagataaagaagacttagagtccatcctcaagcatggtgcggaggcactgttcaatgacgatgactcggcagacattacttacgatgtggactccattgacaagctgttggaccgtagccaggctgagcaggtcaagaaaattgccagcgagggaagttcggaccagaatgagcagacgcagttcaatttcgcccgggtgtggcaaaaggatcgaggtagccttgaagaagtgactgagactgaggacacgcctgtggatgttacggcgtgggagaagattctgcaggagcgtgagcgtgaagcgcaggaggaagctaaccgtcaagctgaaggtcttgggcgcggtaaaagaaagcgcggcacaccccgctacaataacaatattgttatcgaaggagttgacgacgatgagaatcttagcccccgaaagccgcctagcaagatgcgaaagcgtgcagctgacaatgacgatgagttccaacagccagaggatgatggtgatgagaccgagttcgagtccgatcacggcgctgagccaatggaccttacatacgatggagctgagccaatggacaccgcaaatgacggcgacaggactgaggcacaaatgggcactacaaatgttgtcacacctggtcttcatgtaggtgcaggacagcaaggtgagatctaatccatattccatgcgtatcctagttattgcttttttttgttttttttttttgattttaataccctatcattccgtattgccgtgtaaagacacagttcgttaactgtacatgattctcagtcgcacgcgcgttccgttgtgttaattccccgcccccagtgacctaccaccttgatatccgtccttgtgtggcgtgcaaacaacgccacatccctgggcagtgcccactccgttcggctggtgtcgagttctgtggcctctgcggcctggcgcactggggtggccgccggatctgcccccacctgcagtcacgggtgcaggtcagccttatgctggatacgctggaagagagcccggaggacccggccctcatccttaaggcgaaaaaataccttcggggtgttctcaaatcaatggggcagactgcccggagcaaggcttcgtctgccactcaggcggagtctcggattttcacctcgccctcagttagcggggtgagccgtgcccctaccgatttaacaggggcaagtactgagtcgaaagactaaataatgtctactgccacggccggccccagtaggggcgtcttttgatcactttgtgattaccgtcagagatgagccgcggctcccctctttctttctctgatttttggtttgttttgttttgtttgtgtacttgcattgggagagtttggtatgtctcccaaaaaaagggggggttgttctgagcgttatgagcgaaagatacccagctttgttttgatccagctttgttttgatacattgagtaaattgagagaatcaatatgaagttgtatgattatagtattgcatgttgtactccgtagaacaagtaggtccactctgatatgcgatggtatcgcaggaaagtagagagatcgatgtttttagttatttgcatccatttcttttgtttctatggacctttgagcaaatactttactagataggatagtttccgatatcaatgacgactagaaagcagtccaaatcaggcaaacatttaaatctcaccatataagccgtagggatttttagtggtgacacgcaaaatctttaaataaacaaagaggtgcatacggacatccttcttcatcactccacatgtccctcttccctgcctccaccgctactgaattcaaacaagaaccatcttactaggatactgatatgccattagccttcaagatccagccaaatgggccgacggcaaatttccaccactctgactctaagcgcagtctagtcccctacacatgttccgagatcccttgacacaaagccaaaaggccagctctccatcgtatgtttcaggcaatggggagagtaactaaggcctgtcaaaggccactgaattgtcatattatccatgggaactattccagttgtggccagtgtctggcagcattccgcatgttttctagtaaaattacactggtctcgacaactacaacccagctagcttggtgctagctccatctaatctaacaagagacctgctgcaactgaagcatgagctgaacaatgacttggatgtgggtgaggtcgtcgaagaaaagaaacggatcaacagcagaagaacacagacagaatcaggttgaggaatcgagaacactggcggaagaacgcagagcgactcagctcgagatctcgagaatggcgacagaaaaacgccgacagaatcaagtcaagaaagcgagaatgctaccagaagaacgcttcggtacacaatcaaaataacgcgggggaaatccagccaagatgataatggagacatgaaatgaaaggaagtatctcaatgcaggaattagacaaccagttcaagcaagaggaccggctgtcaagtccctgggatgggttgtagaagtggagcataccatggccaaggtcatccatcaggatagccttggcagaattgcagttgataaattttttcgtttcatttgttttgtttctatacaagggtttatttggcttggaatcttacgctagatttggtggatttgcaacgttcggagattttattctgcagccaatgattgttggcttcggaaaatttaggttaagctaagccacccgtacccgagccgcattgtctattgtgacaacatgcaacatgacgggaaagaagaacagcaccagatgatatttcttattggattctttgggctcatgatcaatttcgactttgtgcctctagatgtgtttataggctacttgcaggttagatgggttgtggtagttgtggtgaccgcccgaaagcactttgtcctattttcaagcaagcaatacaagttttccttaatgtgaaaaagaatgcctagtagcttttctagagtactgaaagtaagatgtatagttccaaggtaataaatatagttggcataaggtggaaagggacgctacgataagtcgtaccgggtcgaagaggtgtatatttacgagacaacataactcacacagacctagacgaaccaagagactaaatcattgtgtcattctcatatagtaagacttcaatctttgtttgtactagtatattcttcgtgtcccaccctctacccatagaaacaatacaaaggacatgagtattggtggagccttaagcatatgtagcattgatataagcacattgaaggcaaggaacatgcagaagcagcatggaaggtcagatttagaattggactaagtatgttctgcaggtagccggccaaccttgccaagacacacgtccacgatgcctttacgcgccaaatgtaacagtcgccgaatgatacacagcttattcgtgcctttaattggtctattcctacactattctagatctatctgctctttgatatgcatagaatgatgtttgcatgccacctgcaacattgtaccctcatttcccggtctgatggaccagggcgtctttgtcatggcgaccttattgtgagcttaaacacagatagatcccattgtgtattcagtatatccgatgtatctagaatagtatagttcattgagtagatctaattcatatatctctttgatatgtagatagttagcgcaaggcaggcttcatgagctggggctctccaatatatgagattgtgttttcccgaatctcagtttcccatcccatcttcccattttgctattgtcctgtttgtcaactctagggctatcaccctgtcacctgtcacctgtcacctccccccccttctcgcacaaacacttcttcccacctattttcttcatccctcttacctcttcctttctgtaccatacagaccattcttactgcacaatcctatccaccccagtctctcatctttattcttgagcaagatttgccttttgtcaagatggcggctcctggtcgtcctcaatttttctgcacccgtcctgatgggtccttgactcctctggtagcagttgatgagctacccactaacgtcaccatccatggtgcccctcgtatcatcactgctggggagacccagggtatgaccagctgtggcctggctgcccaacgtcccgaaccttggtctgtcgagggacttcccaagtcctctgagggtctgcctgatatgcacagcctcttgctgcagcttatcaccgataagaatgtccctgaggacatgcaggcatctgccaaagccattctcttcaagggaatcgacaacggacgtgtcggtcaaggcactccttccaacggactttctccaatggcgccgacattccagacaaagaacaaccacgtcggcaacaagcatgtatggccaagtgttcctgtcatgtcatggtccattatttaaccctttcaacataggctccgacttccaagaaggaatactgctcgtactggattcgccacggtgaatgcgattactcccagcaaggcaagttgaccacatgacggagactctatgaggccttgactgacccgatgtcacaggttgcttgtacaaacatgaaatgcccaatgagcaggagttgattgagaaacttgggctgcgtgatattccccgctggtaccgcgagaagttcaacgtaaccagccttttgcacccaaatcgtaatcgcccccagctgaccattgcggatcagcaaccccccatgcgggccctgccgtcctcggcttcgcctactgacgagatcaacgccgacaaggcgtccaatgtctgtgaaaccccgaaattgagcaagtctgccgagttcaccaagtcccctccccgtggaccatccaaccgtggaggtcacaacgggtttggtaaccgcggtggccgaaacggggctcccaatggacatcatgtcagcaactggaaaggctcccaccgtggtggccgtaaccgaaacatgggctcaactcgtcacggtatgatgagcgagcgtgacagcgatcgcagcggcgagtgttccccccgcgcctcagctatcgcccgttatgacactcaggcatttggccgcgatcaagttcgcacccctatccccgcgctgcgcagcatgatcactatcgataccgaccaacgtcccaacgaatgtcttttggatgacggtaactttcaaacccggaacctctaccggaatatcaatagcctgaccgagtgtaatgaagataccttcgaagacgccctgaacaagccgattgagcccaaccaccgtgtccagtcctcccacgtgtaccagcacgactcgaacacttcttccgatggtggtgtcatgttccccaagaaccatgccgcgtgggattcgaactttggttcattcgctcacgttgatatccctgctcgcaagcagtcggagtcgaacagctctcgtgccaccgtccagagggattacggatcttccactccccgcattggagatcttcagctcaacgacaatgtgcccctgagctcgaatgacacccgtgtcacctggggtcccattggaggtcccattctcaagcgtaccagccctcctctcgagaacatctcgcacatgtttggaccttactccaacagtctccgccgcagcaactaattggattgtctgaaacaattcagtcaggcatgcttggcctggagtggtactcatgatttcatgatgccgctccctgattgtttcttcaggcgtatgagatctggtgcttggatgttgttttctttcgatgtcgatctaccggataattatgccatatcataccacaggctatacccaagcaaatggaatagtcatgacgacaatcctcatggtggagaggcagttgtggtcaattttttcgtttctttattttctttatttgatttttattgtttctttgcgtggcaccgttcaagcgtttcaagcgttcaaaatatggaaaaaaaatgtgcccatatggagttgtgatttttgcgtgttttgcttctattcttatttacctggaaccgcagcggggccttgttccatcatggacgggatgttgttgttttacagaggaactgggctatgaccagttatcaatgcaatgttttattgccatttcggttctctagtagtctctacgcagttgcgagtaaagtagagatctaagttgtactcgctggtaagtcaagcggcaaactacaaatggaacaacagcgagccgccaatgcatggaataaaatgactatagtacattcgaaagaaaaatgccaaaaatcctgaaatatgcgcccgcgcctcgcaaatgtttgacaacagcttctcaaacacacccaatatacagttgacgacatccattaccggcgagccacctttttccgagcgccaaccttgacagcaacgcgctcccgctcgtcagcggccttgacctggagagcagggttgagtgaaggcagagtcttgatagcctcggagacaaccgaattaccgtccacaagggcagctcgctcttcctcggcaactagacgctccttgcgccgcgcagccagctgactccgacgggtctcggtcatgttccaggattcggggaattgcagcttggtcttgggcctgtggtggcggaggtcgagcgggacatcggcgaaggagtcgccttccttggcctccttgatcatcgagttaacgagatctgccaggtagcgcttgttctgggcgcgcgagccaaacttctcgctcgacatgcggatgatatcggtctgcgggttgtagcgcggaccggccagcttgaggaatgtttggcgctgggcttcggtgagatacttgggagtcaaatcttgggagacaagctccacaacgaccttcggctctgctgggtgctgttcacccatgtaggtagtgtagcggaagcgcagaatgtgggtggagggaggcagggtgaatggtttggcgagctctagttcaacgttagtggaaagactagtccgatgagcaattgatcttactgctcagcattggcatgtcccatgcggtaatgcgggcatattctctcatttcacggtgcaattccatctctgcatgtgctagggacgtgatttcgtcgtcattgatttcctcatctccatcctcgagtgtgttcaccaactcgtcaggctcgtcttcagcccagaaaccagcccgacggggccgaggctcttcgaatcggagatcttcttccttatcaatccttagcatgctctgctcgatttcctcaaaggccgcggcgcgcttcctggggtcgttgaattcggcaaccatgcggatgttctgttcgtcgaatgccgcgcgctcctcgggagacatcatatcgtacattgagcgctgctccttgggaaggagatcgactgagtactcaggcattggggggaaatcctccggtctgagttccttcggcggaggaggaatcacggggtcatcctggacgcgattgagcggcgaggcggagaagtaccgagcagatggggcgatgaggcccctccgagccagatgcccgaccgggcgagtcagtaaccgagctgctgaagccattgttgagggtatagcgtgggtagggacaggatctcaatcacgatgttttccgcttccacttttgcgaggttcaccgccgtacgctattccagattaggactagtgtagttcgttctcacgtgatagcatggtatatgctgatctttggattggacaattcccttatatggagatgatgattgactacgagagaacttttcaagactgattctctgcttacttcgatctaataacatcgccactatgaagttatgttttgtgactgtgggggccacggcttcctttcagaaactacttgaacaagtacttaattcacaatttctcgagatcctagccaaacacggctacacccatcttcttgttcagtacggtaaagatggccagcagattttccaaaacttcgtcgatagtgaccaacccgaccacggtatcaccctagggggcttcgacttccagccgagcatcgatgcccaaatgatgatgaccgtggaaagagaggctctggaccaaaagcgcggcttgatcatttgtcacgctggtatgaaaatcaatattcgcctgtccaatatggatgccctgatccacttaccatctcacaggaactgggactattctggcaggacttcgcttgggcgtgcctttgattgtggtccctaatccagaccttgccgataatcatcaacaggaactagccgatgagctggaggaagggaactacgtaattagtagttctgtcgagtaaataacctatcctcctttgtcttggccagtctggctaacctctgacagggatgtgggcagtgcgattagcagagcagagactcagaaagccgaagtattgtctatgacacctggaaatacaactcttgcggaaagtatgtctgatgatttgtgctttttggactaaaggaatctctggtggcctctttccgccaacactttttgttgcctggatgggcttgagcgctggcttttatcacgaattacgacgctgcatgaaaacaaaatgggaattaatcaagcaattggtccgagttggtctggtctatggagttgagaggagacctcatgatatacacgaagagaatcaattacttctcgacccattaaccactaccgattagcttttagtacaaatatcggcccatgtgtattatcgcactatatatcgcactataatcagtaaaatatttaatatctgtaactcgaattatcgttgaagtccaattcaccaggcgcggactagtggcccaagctccttgttgacaattcccgatttgcggatttgcggtttcgcgtccactcctgaatcgacaacatcaacgcccagccaccgaaacactatatgcgccttcaatcaacatccactccgttgatcctccgagtctcccattctaggccgagaggccgtctgtacccgcgcgtgtccttgcccgacctcacctcccatccccaacactccccgcaatggctgaggcaactctccacaacgtgccgattgtcatcgacaacggcagtggcacaatccgagcaggctttgccggcgaggaaattccatcatgttatttcccgtcattcgtcggccggcccaagcacccacgggtgatggccggcggcctggaaggagactcattcatcgggtcccgtgcacaagaactccgcggactgttgaagatcaggtatcctctggaacacggcattgtcacgaattgggaagatatggaatcgatttggcactacgtctacgaaaacgagctcaagaccctccccgaagaacaccccgtcctcctcacggagccgccgctgaaccctcgcgccaaccgtgatatcgcagcccagcttatgtttgaggcttttaacgtgccggccctgtacatgtcgatccaggctgtgttgtcgctgtatgcgtctggtcggactacgggtgtggttttggattctggggatggtgtttcccacgcggtgcctgttttcgagggtttcgctattccgaacagtattcgcagaattgatgttgctggtcgtgatgttacggaacagatgcagttgctgctgcgaaaggctggacatgtgctgcacactagtgctgagaaggaggtggtacggatgatcaaggagaaggtctgttatgtgtcgctggatccgaagcgggaagagaaggagtggatgaacagctaccacaagtctgatgctaaagcaatggactatgttcttccggatggtcacaagatcaaggtatgtctacggaaccgttcgtcttgggttatactaatgggcttgtctagatcggccaagaacgttaccgtgcgcctgagatcctcttcgatcccgagctcattggcctcgagtatcccggtgtgcatcagatcgtgcaggacgccatcacccgcacagatctcgacctgcgaaaatcgctatacctcaatattgtgctttctggcggttcaacactgtgcaagaacttccctgatcggttgatgcgcgagatcaaaaaactagccgtcgaggacatgaagatccgcatttccgcgcctgccgagcggaagtacaccacgtggattggtggtagcattcttgccgggctgagcacgtttagaaaggtatgttaatccctcatgtctacttcatcattgctgactaaatactgtctagatgtgggtaagcgcagacgaatggcacgaggatcccgaggtgatccacaagcgatttgcataaaggcctcgtctctgacgaagtctttgatatcatggtggccttctaccgagtcactccggatcacatcactgcctccaccgcgatcctaggcaccatctcccattccataacaaacaacacaagaaacagatcttgtcactggtcgatcatcatgcaattggcagtgcataagaagtgatcgaccaacatcacaatccgagtcgtatcctgactcttgataccccagcttcaattttcttccagcttatgtcgtctggcattggctctgactttgcaaatacagtctctgcgtcttggggatggttctactctagacataatttactcggacatactacagttctcgtcatggattccctgcgtagattgattagatccggtagatatatttgcattctacttggaatatttagtgcagtggcagtcatctgattcattccacctctgactatgggtaaataatgccgatgttcattctccaattctccttctcctattcatagttatgactcaactacatgtagtcatagtctcatagattggtaaccaaccaagtacccgaagtacccggatggaagtcatgagtaagccaaggaggcaatttctattttaaacaaaggatcctattctattaacggttgcacgtcttaatagagaacaaatatacaggcaaactatgaaaaagaacacgcatgtcgccacgtaccaaaacacaaagtccaaaatatcgaaaccgaaagcgaatatcgaaaccgaaagcgaaatccacatcaaccgaataataagaacaaagagaatggaatattctagaccggagatcccaaataatactagtttctacgctgtacagacagacacctgtggatatccccaaacatcatgtccggctgtcatcgcctagcagcgggtacgacattacacctgacgtgcgagtatattcgccataggtggaaccgcacccggcaataccacaacaagcacgtcttgaaagtacggaatctacggctacaatgatgtaattggagatatttttgtttttttggagacgtgtaatccagccagggaagacaagaaccccaagcatgtattgtattttgtatttggtattgtgatttgtttagacccatggctaggaagtagtagccctcggaatggcgcaatatggggggaatattgttgaaagcagcaaagaaatacagaaaattgcgacacagagtagagtaagatggagcaatgggaaatgggtaatgggaaatgaaaacggaactccggaatgatgcaaccagacaagtgttgttcgatggcgcgatcttgggtatgttgaatttgagactactccgtagaagaataggacccggtttccagaacctggcgttgatgcagggtggtttggctctaggcgcaaatgaaccacaaagaacaaagaaaacgccggtttgcccatggttgagagtgaagaggttggagtttcatgcggaaacaaagagatggtgagggaattcgactcggggtatttccatagacagcagaaagaaacatgacatgtagtagtagagggtattgtcatcctcgatgtttcaatccggtccgatggaaacccatattaaaaaatgagaatgagcatgttaaagagagaaaaggcaaagaactttttttgtcgttatgtcgttggtgtaggatgtagaaaagatatgctctaggcagtacccttcagcttgccccagcccttctcgagaccacgacgggccatgtcacgagcccgatctgccacggagccagtgctggagttggtagccgtactaccagccgagtacttgcgagtcagaatagaattgctgcagtcgtcgcggaagatggtgttgccggcaccgccacggccgacgtggtagacgggggcagcctggcgcaggtcacgctcgagctcttcgtcgaagctgaagatggcgcgctcgctgctgctgtggatgttgccagcaccgccacggccggagacaaagctggttggcaggcgcgagtcgagacgggcgagagaggctggtccactggcgctgcgcgagtcggtggtcttggtgttcttgaggttgacgacgtttccacatccgccacggccggtgtagactgctgggcgaccggcgtgggggacagatgggtgcggctcaacgacgcggtaatttgaagaaggcatgttgatttgatgtatggtggttggggaattagaagtagatgtagatgtgatgtagatgggatgtagatgtatgaacagtctatgctgtgaagggtattgaaacttccatgaaggatttgcaagatgtgtggatatggctaacaaaccgcggggccctgatgttatatagtcccagggcccttttttgacattttcacgtttttggagtcatttccagatccaggcacgacatccagtcacaaggccgtgtgggggctttttgtttttttcttttttctttttgaattttcattttgaattttcatttatccctttccttcgtcgtcatcagcctaaaccagccagggatatttcccctttcgacccccctgtgatctggtgctacaatatgattggctgccagtctcccccagacaccctaactctggctgctttaccagctgtcctctgggcaacccagtcatctgactggggcggctccaccaatggtgagtggcaagacgtaacaaaaactggctgggcagccaatcagcatttccattacccccaggaaatgcagaaaacctctcatttcaggatcaccgagtgtccagatcctattgctttccaatgtcgagctcacgttgttctgggaatcacaccgcaacagatgggccatttcacgatcacgtcaggtgttgcgccattgggcattagatacaattgcatacatagaacatggtatacatcgataattgtatacattggataggatggaggattgtagtagctagtagaagtagctggttgaacctgaatattaccaatactcacgatgtattataaaatacataccaagagaaaaggtatttttctgctccagcaattgcatcatttaccagcccgtgtccactttctatttcagaacatcaggggctttgtgcaacacatttattatttctgcatgtccagctgatggttgcacaggtatataatgtaagttgatatatgtatacagcatatactccgtatactaatagtagttagttataactatatggtcattaactatagtaaaagatgaatacttaagttgccgatgaggaattatgctaaattgcacatctattgtagatcgcctgtacgatgactccatcgcgctggcaaatttgcgggatattctcccttggccccgtagatccaagtctagtcggctaggcttgcacggtacctgcccaggaggtgtcttccataattgactcaccgtaagtgccgagtaccctgcgcactgcgcacgcactgtgcacgtaagaatagtgtcaggccaacccctcggcagtcgtccagctgagccgaggagtccgagacagaaaagggaaagtgccgttccccagacaaaacacaaaatgacgttgcaaaagaaaaaagaaaagaaaagaaagaaaactcttcctccctcatgattggctgaattatccgagcggccagggaaccaaatcaccgcccttccaagattcgatgtctgtgcgtttcgcatttccccagattttcctttccccaactttttctgcgttggaccgagtcatgcgtctcggagcgtgatctttccagccctggatgccgaggaacccccgcttaaggggtaggatgcagaggaatgattccgcgatctcgtgggggcttggaatacgtgtctggacgtgacacggcgcttcggagtaggattgtcaggtgttaggttcctagaataatgtgccgatctcccacagggttagcgcctgacttgataatcttcaggggaacattccattgcccctcacatagaacacaatcctgttatgtcgagaagagaattactgtacagaatacacaccctcaaatgactagcgacacacattataaacgattgggtaaggccgttcttagtaggcgctttttcacaatgtaattgatctcacagccactaaatactgtaagccaccctcaccgtcagccacagtaaaggtctgtcacatgatgccgccggctagtttcataaagctactcttggacatagtcaacattgcctagaaatgacacccgaggaatgatcaaatccaaaatagtgatttcttcttttgtaaattcagtctacctgtcttagttttttttttactcccaccgttttgcttcaggccgacggagtaataaccgcactctccacgctagacctacccaccaggtccgcaaacatagacggccgagccagcaaatcccgcggaggcccatactcagccaacctcccctgatccaacaccgcaaccacgtccgaatccataatcgtatccaaccgatgagcaacggtaagcaccgtgtagtcctggaactcatcccgaatgatcccttgcatgacctgatccgtctcggcgtcgacgttgcttgttgcttcgtcgaggatcagaatcttccctgagcgcagcatcgtgcgagctagacagaatagttgctgctctccctgtgacaggggctgctccttcatttgtgcgtctaatccaccacgcttctcgatggcgtcccaaacctttgttttcttgagagcgttgatgatagcttcgtcgggtaacttgttgctggggtcgacgttgattcgaacggattcgctcaagaagaatggctcttgtgggatggcgacgagacgactgcggactagctcccgtggcagggtttgtaggtcgtatccgtcaattgcaatacttccactgtcaaggtccaataggcggagtaaggatagcagaagtgagctcttgccgctaaattatcacctattgtcagtaaacaggagattcctggggaaagaagatacccaccttccggtccgcccacagatgcctactttctggccaggcagtatagacatggagatcttcttcagagctgggatggaggggctaagtactggtcagtgtcgtccatagtaaccaatcaaacctagcttacctgtaagaagccgaaatatccttcaattcaatagcaccatgctccggccatgtatccgggggagtagtatcttccccttcctgatactcaggtttgacagtttgctccaaattcttcaatctcgcaatcgctcccagcgaggtctctaattgtgtccagctgtcaatcaaaacagccagagcttggttgaatccgagaacattattcagtgccaggccgatagtgcccgcactagtcatatgcggcagtaagaccgccagggcaatgactacaacgccaactgccgcaacaaggagatcgagaacaaggttgagccagcattggatgcagtacatcaagtagaacggcctctgggtggtgtccagcagcttggtgttggtctcctggaatttctcctgccagccaaacgcacgaagtgtggacaggccctctagggtctccaggaaatgactgtacagcgggctccgggactcgagatcgaggaatcgcagttggcgcgacgtgcggaggtagaaccgctgcagccagtacacggtgacggcacagattggaatacaaacggacatgtaagatgagcccatcgcgataagtgctgtctgggaaaggatttggaaaatctctgtattctggattagcttacctccatgcttataccaccctggagagatacttacggacaaccatgcgaattagacaaagaggcagtacccggtcaatcaaaccgatgtcctggctgaacctgtgtcatgttagaatcgagtcatctactactttcagaggccttactggttcagtatcacaccactatcggtttttgcaaagaaagataaaggcgcgctatgcaagattagcagttgtcagctttaagaaagaccttcgcccttacccaacagcaacccgcaaaaggattcgatgaagattgagagaggagattggcgacatccagatcagagcccacctgcaccaattgttagactttcatctcaatttccttttgcgaaacgacacataccagaaggttagacagcgggaaagcatagcggcaacagccagaacaacatagacactcatatattttccaatagaacctccgttcacatttgtccaccattgaagccagatctctgtatactgttagcatccgagtcggttcatctagaacagttcgactgaactcacgctggaaggtggttgcaaaggtaaacaacgcagtacaagctatgaagccaaatgtccgaggccagccaaaagatcggaagtagtacgcatagactgccatgtcaccagtttggcgtgttagatctgcatcatctggtcccggcgccttgattttcggccgtggtttggaggatggctggggtgcactggcgacgtcctctgcactgaggacctcctcacagtcggaggtcgctatatctgttttctttttctggatgtcctggccgctcaaaacctctcggacctttccctcccgagttagaacgataacctggtcggcgatgttgagatggcgcactggaaatgattagttacgtcttcaattataggaccgattgtggtacataccggagtgagtcaccaggaggatagtagtctgcaaccgccgaagtaatccttgctcgccgaataagcggtctacgaccagtgcttcggtcttctgatccagggcactcagaacatcatccagtaaaataatactgcgtctagcgtagaccgctcgagcaagcgcctacaaaaaagaattagtggttggtaaacgttgagtaggatagaagctagttgaacgtactactctctgcttttggccgccgctaagggttactcctcggctcccaactacagtctgttcggcatgagggagctgcgacaggtcttcttccagagcacaggcatgaatggtagtctgaaaccatacatgatcaattttttcctcgtcgcaaaacccgcagataacatctttgatggtaccattgggcaaccaggggctctgagcacaaaaggcaatgtttttggtggagacggcaatagtgcctgcgtcgcagggtagttctcccaagaccgctcggagcagtgtcgattttccgcagccgacgggtcccacaaccagcgtgagggagccttctggacagtccatggatacctgacttatagctgggtcgacggttggtgcaggccggatcgtcacttgctgaaccttaatggtaggggtcgaatgggtagtagtctctggcactttctcaccctcacgcattgtcccgttgggatggctaaggctcacctctaagcttgagtcaccactgcgagaaccaccgagtccagtgactccgcgactatccgaacctgctggagcacgaaggaatttctggagccgatcaaagcagcctttcatggctgcagactcattaatcgcaaacataaggagggaggcgggttgggtgaccaaagttataatggagagagacgtaaaagcctggttcgtggacaggctatcggtaccgcgagcagtggcttgtgccacaaacaccacgaacgtcaggacgggggcgaatatcaacggggcagaagcaatggtgttcgtccacaatgccagccagcgaaatcccatggcggactggatttccttgcggcggtactcctgcacgctactctccaccacttcagtcatgcccatgattttcatgctcttcatcgaacccagcatagatgccgtgacggcaatgcgtttctgcacagccgcgttccagaccttttgctttccgacaattaatttggaaagttgcgagttggcaaaggtgcacactgcggtcggttagtgttgtttcaaacgttaataatctacaaggataggagctatcaacataccgacaatcagtccaatgggcagcacggccaccgcgcccaattgatcaaccagcagccacatgccgattgcaatctccgtgatgcgtgcccatacctcatggatattttgtaatcccacggtgacacgatcgatgtccgtgctcataagcgtaagcgcggccgattcatcgtacgagtcaggcatctgcaatgtctgactgtatacgagactgaccaaagagccccgggccattgcaatcattctgtacatttcacgcttgtagaggacggtagtgatctatcgaaactcagcatccaggatctcccacaggtcgagaggggtgcaggaacgacttacggcaatactgatgtagactaggaaagcagccgccataagccctaaggcatggctgcggagttgttcggaagccggggcttcgacaaaactgataacacggctgatcaggaatggttgggcgtatgtgaagccgatcttggccagtcgcggtccgacggccgacaagagggcccatcgcatgcatgagatagtggccatgatcaacgcgtagggtgaattggagtgcgctatagttttcgttagccaaatgatcaccgatggggagcattcaagtacctcgacgggcccagctggcttgcatccgttctcgaagatggaaggtagcgagtttgctgtccatcgagaaaagatcctcgattgatagcaaacgggcaaatcccctgaagaacagcggattgagccaccagaatagggtgcgcgcccacacatttgctgtcgcttcgggaggatggtggcgatacggcagcctgagttcatggatcttactctgtgcctcgaacatgagcagtattaccttgagacccgtcgctgcagtaaataccgctgccatgggcgtctggtcccccatcaggaagagtgttcgcgactgggggatatccaggacgagcgaagccaagagaaagactcccaagagggtggaaggccgaatggaacgagtatgctccatgtaggaaagcagacagatagacagcgcatcgaccaacgacagggcggcagccgggatggtcgcgaccgtttggacctgtggatttcgaacccataacactagtaaggcgacttggacaccaaacagagcaacagcggctagtagcttgctcgagcacgccagggagaaggagacattggtcttaaggctggtgcgagacagccagtataatcggaagggaacgataaggagcagcagggccgaaggagcaatagacaggatggattgttcgaaggtgagggtgaaatcaaagcctccgcggcaccgggcatcgatcgaggggccaaaatggagatcagcagcctgtgggcagagatcccaagtatcggaagcattcagcgccatggtctatttctgatgaaataagaaccatggactgaaagaaagaagggttgaattcacgcgagaacggagagaacacagatttaggggaagtgaaacaaagagacgcgtgcttacagggtaggtggaactagtatctactactacgtctgctatttatttagtaaaaactactaattctgtcttattctttatcgacatagagtcaaaattaacaaaaggtcagtataaagctagtaaattatatatactagaatgctaacagacctttaggttttgctatattggaaaccttctcaaggtcattgtcggcccgttgtcatcgcctctactatacagtgtactgcctcacgagaccatgccactaccgtgcagtccgagccaatagccatcgttggggctgtagatcccccgggcagagcaaatcgacgtcaaagctctgggagctaaggagtccgacgggaacagtttttagcttctaccgatattaaggcaccgcgttcgccattcctaccatgttttgacgcgcaacttgtcggaataaaacctactgaagctaattgtattggccctcagtatcgtctacgccttgaggccgtctagaatcggttaactccgttggttgacggctgagacagcggtctatgttgggttgatgtggggggaatatgatcggccgggacctagactccttccctatgtagtacttccggaagcatcgaagcatctcgaaccgtctcttatttctttgactggcatggttgtagacttagccgacatctatcatctatgactaatttcttagcagttcaaaaactaagggcagaaaaggtcatatgatggttatgtcattgatgggaatagttaccagatcagaatatatattcaactaggccaaattgaactggtgtgtagatagggaaatagtcggtttgggggtgtacagtagttctcttctaatttacatcttagagccctccaactcctccaagcggtgcatatccatatccttctccaacagaggaatgacgtaggggtcgaaagtcttccagtaagggttgttgaggtggtactgctgcgacgattcctgggcgtagcgctcgacgatggtgaaatcctgcttgtcgaagacggactgcgacacaaaccaggagagggtttccttgtcgttcgagtagacgttggaagcttcaacgagcttggccttgagcttggagatggactcttcgtccggcttggcacggaggtctacgactgtcagcgttgggaatagcaagacgaggggtatcacatacggacgacgattgtgtaaaccatgattgtttagaggtgaatgatagagggattgaggggcaatggacttggaggggaataactacttttacgaatttagtcatcggtgaattatgcagaatggaaatctccgaaatttacccggccgggtcttgatgtcttgataagcttatttccattccagtatctccaccaagctccaacgatcatgaggtatttcttggacagaaagaatcctaaggagacatgcccagtttcaattctcagtcctgtgagccaacctagcaagcaggctcatcacctgcgttgccaaatccggacacttaagatcggatgtcgtcacgagcctcactgccaggaaccaccttgctaaccatagcgtccgcgacacactgcatccactggtagggctcatcggcacgaagacggctggagaacgagcccttggccttcatagcgagaatggtagtcacaaactgcaccaaacgcgagacgtagctcgaattgagtctctccgcgccggtgagatcaatgatgacctcctgcacattgtgtcccgccgggatagcgcgacaagcagccctccaatccaagttgagggtgatgaactccaagccctcggggtgggtcacgtagtcgatgaagacgccgtccatgctcgggtacgggaacggcagtgccatgaagaactcgcggacctcggtcggcttgttgcgagacaggcggcagtatccgtcgccggacaggccgcggaggctcggctcggggaatcgtctgccgatgaaccggtgcaggggggcgaggcggagcttggtcgcggttgcgttcggtgcggtgctggcgaggtagacctcgaataccttggggtcttcgaagacgaaggttgggctcgtgacataggcagggagctcggtgagccgcactgacatgcgcagggtggaggcgccgatcgggctggccacgaggtcgccgttgatgagggagatcagcagctcggtgttcaccgtgaggatcttcatcccgttggcgagttggtcaatgttcattgtggcggttgctatttgaaggaaagtgatttgggaacttggtttagggaactggttgatggaatgaaggaaggactaatgtaatgcgacaggtcgtgtgaaatttatggcgatgtgaatgtgtgacgacgtaagcgtttgatgcgttgtgaacgtttgatctgatgtatacgttgtcgcgatgtctactgtaggtgcacttcctgaagagtctttccaatttgcgaaagagcgaacaaatatgaatagcgatctacctgacttcattagatgttaatgacattctattccccttgcaatatcccaacctcaggaacttccaagctgaccatctgacacccagtgagaaccaccagcacatcggtaaccaccgctttgtttaagccatttaaagccagcaacacagactcccatagacctcagcttcatctgattagcttgttccttgcggcgagcctcggccaaagcctcttgctgcttgcggagtttctccaagatctcttcctgcctcctgcgttccatctcaagcttgagtcgggcttgttcgaggagtcttttggcatcttcgtctgcttttcttttggcctcttccagctcccgcgcggccttttcctcctccgccttcaattttaatatctcctgcttctgcttctcatattcctctttcaaacgcaagtactctttctctttggcttctgctagagccttgtccttttcgagttgatgccatacttcatctgtaacatcggcatctcgctttgcagtggcagtggaattctctgtcttgggctctgtcatgtctggttccttggaggcctcattctcgatgaccgagctttgattgtccagcttggtgacaggcttactcaaaggttgagtgcgtacagccaggtctgtttgctctgccgcttggatcgcagttgatagaccgttttgcggatagacttcccggctggaccgctcattgatcattgagtcgagggcttcgagcaccgtgtcttcgctcagcaccagcttcttcccactagatgacagaagagtttcgcgaaagattgtcttcgtaagcgttccgacgtctcgtgcatttgcccagcctgcagatttcgcaagtctgtcaaagcgctgcgacattcccttcataaagtcaaaatctggaccctccaagcagactagatcgaactgagcctgtgatttgttgaggaggtctcttttttctttcaacaagagctcgtaaactaagttgacacagtctgctgaggacaatgggtcgaattgaagagactctgggaagcgactggtgagccccagattgattgacatgagacggttgatgtctccatcataaccggccagaatgatgatcagcttttgagcaaacttgggcttggtaatggcatccacaatctcatccatggcctctttggcgaaatgtccctcagcgagccgataggcttcgtcaatgaacaagacctttccaaggccacgttcgaggacttgcagagtcttcgggcctgtctggcctatatattgacccaccaagtccgtggctgaggtttcgaccacttcattcgaagctaacaagcccatgtcatagtagacttgccccatctttctagctgtgctcgtttttccggtacctaggatttaaatgtcagcaatattcggcggacaaatactgaacggagaggtgtatacctggaggaccacggaaaacaaagttaaacggcaactgcgtgcgcggatccaagtccagtcgtctaaggctctgaaccatttgccgatagccttctagtttggcaacgatactttcacatcctatgacgccttcgaacatctttgcaacactttccttcttatctgcacgatcaaagtcttcgtcaaagtcagaagcatcaagcacagaatccggaatagaaccggggtgtttgatggacgagaggcgcttttgataccgcatcttggcggcgttgagcagattatcaatcttgcctgcatttccaaaaggcggtcgattccgagcacgctcgagcatctccaataccacacagcggccacgatcatttattccaaacccttgttctttgagcttgaggtccaaaatcgcatccagctcactcgaggtgaagtcctcgaagacaaatgcctggtcaattggaaaacgtcgggtgaggccagggttgaccttttgaaacatctcttccataagatccttgtaacctagaagcaagacgcacctatcgtcaccaggtgtgctttgcacttctgccacgatggtgtctatcacggcagctcggtatgagtcactgttggaacctgtcccatccgaggtacctccagagaacagtccataggcctcgtcgatgactagaacctttcccaatgtagatgcaagtatccctttggtgttcttttcggactctccaatcacactgccaacgaagtctgacgggttctttaccaccactacgattgtcagtaaactttatagacagcggaggagcccacataccttcgccattggacaaaaacccgatatccacaagtatctgaccgtagatctttgcgatagaagttttccccgttccgggatttcccaagaaaactttgttgagactgtactcaaccaggggcttctcatccagctcacgctggtagttgtatcgcatggtgtctagtatggcctccaccgtcttcttcacagagtccaaaccaatcatagtctgcagcttttgccaagcattggatgatttcaaagcctgcgatggatctggcccgatcatgtcttccttgctcagaaagagattatcaaccttgctcgcagcctgtcgtgtttcccggctgagacgtacagcctgtcgttcagaaatcttggccatggcattctcaacggctcgtgcattggcgaatccctcacgaccacgtccgctcccaacccgacgagctacaatgcgacaataaagtccgccaaggttatcctcgaccttcatctgctttttgtatttcttttcgatgcacccgaccaaaatctgcatcaactcggcgtcgtcgaaatcatcaaacttgagctcatttgggaaacgactaggaagcccggaattgtatgcgaagaacttctccatcggtcgttgatatcccgcaagaatgaagaccacttttccggtgaggttttcaatctcagctaagaggaagtccagaacttgggggccgccgaaactgctgccgacgagctgatacgcttcatcaatgaagatggccccgccgccgtctttcaagaggttttcgatgattttttgacatcccgagacaccatcgttcgcgagtctagacccggttgtctcgatgaatttgtcgccgggaatgatccccatggacgataggaacttcgcgtatagacgcgcaacggttgttttcccgctaccgggattcccgagcaatacagatccgaatcgatcgtggctcatatcaatgttctgtctaattgcgacgtccactttagctttgatcgacaaaaactttgtcttcactgattcaagtccgatcatgtcgattaacttgtcgatctcctggctttgagcgttgaggaacttcttttgatacttccagtctgcttgagccgcggacatcttttgtgatggcatgacttgtcgacttggaggctgcacactacggctttgagtgcctgtggcactggattctgagcttgcttccgtgatggttgcgggcgtgctaggaatggccccagagctcaatttccgctgaggcgatacagggcgcggaggattcttcaaatcctcaatttcctggcggtactgttcaaggaccttcgctcgctccatatcatcgaattcatcgcgtcgcacacgcttgagatgagaagcctcctcctgagcctctgcaagcttccgggcgtactcgctctgctttctttgccgttctatctctagtctgatatcgcgtttgcgcttgcgctcttttacctgatcttcttggatgcagaaacgacatgaacccttggcctgggaacaggacagagacaaggaatgaccgcgggaacacttccatttaactatttttgtgcacttcatttttgagtggtccagaagctggtgacattttgaggggcactcgtgtactccgcaactcagtttcacgccgctatgggaaagtcagtattaagatatcagcaaaagttctggtaaacctaccaaggggcagagcatcctccgtctgggcattctctatcgaagtcctccgctgttcggagaatcgaatttgtctgcggatgctgttcgcattggacgggcagtccatcgtatagatgcccctctgacttcagttggtcgattagcggcttccagtgcttttggcccttccgactagaaacgaatgtttccgagtttccaaccataatgaggacatttcgggctcgggaaaggaggacgttgaggcgctcgggagctgccatgaatcctatgtcgccaacttgattgctgcgggtgagtgacgctatgactatctcactctcttctccttggaagttgtctattttctcaggtcagactttgcttgcacctaatttcttctccatacttaccaattgtagacagcttgattggacgcttcgaatgggaggcaccagcctgcgacagaagacctgctttgacaaggttgtgggagtcgaggtcattcagaactgggtcgttctgtttgcttagagtctgtctcagtagactaagctgacccaaatatggagtcaacacgaccagcttgtctgttccatacccctgctgtccgagatacttcacgatcttgaggacgatctctgcctcgaatacattgctcttacttccctttgagttctcgtcgtcccggtcagagacctggacaaaaatgtcttccggattttgatgatggaaaaatatcactctgtcgcacagacctcgtggctgaggacgattcttggtctttttatcgtcttccagcccaggataggtgaggttgcgcacaagacttgagatctcgggacacattctatgttgcttggccagtgtcgtatgtggaaatccgacatgtatgagtctttcgaaaagggagacgttcaggtcatagccatcgcctttctctgtgctcaagctgtagctgttgatttttggccgtagctgctgatgatctcctatcaagatcaaatgcttggtctccggtgtcattgcggtgagcacatgcgactcaaggatctcacccgcttcttcaagaagcacgatgccaggggaagcatgtcgaatgtcctcggaatacattgccgccgctgtagtggtgcagccgatgattcgctttgatttcaagatttcccggtttttctcacccagggtagcgctcagttggctttggcttttgttgaacaatgctatgctaacgcccaaagactccgcctgttcactcagcagagctttcttccaagagctgtttttctcctcccgtattttctgatcgagtgcccagatgtcgtgacaatgagcgggaagaagatcagaacatacccctgcatcctggttgcggatccatcggtgataaaggtagtcttttcgaattgcttttccactattatcgaccacggccatgctgtttggttcctccggctccggtacggtcagagctgcaaagtattctggttcttcaaactccagatagtccaagatagatgtagcattagctgtgagattcttgtaggcttggaaggagtcattcaaattgtccttttgttcatttgcgaccgcttcgagtgaatgaattgtgttccaggtggtttgatccctacggtaggacgagtgctgcttaaacaacccaagcggctcggttcgttgtgaagacttggacccgagtctgacgatagtagagggattgataccaacgtctagtaagtcttccaagaactgatccaaggcatgatttgtgtagcacataaccaggattttgtctttcgaattatcgtgcagggcctttgcgagaagagcacctatgaacgacttgccggtacctagagctcatactgtcagtttaatgtcctcggttatagaaatgagaagatcatgagaggatactaagatgatagtgggaggataatgagacgatccacatgatcttacctgggggaccttgaataagactcactctctgtgtcaacccagccaacagagaatctaactgtgaagagtccaatgtcactgacatcgaggttttcagggtgcgctggatattacatccgcgttcttcctccagcatgttgaccaaattccgaggaactaggcttgaatcctgcaccggctggcctttttcgtaaaggaacaactcctctgtgagaggcaactcaatcctctcctgcaagcccttcaaaattggctcgtatgcaaacattgctgtgtcaacaagcaggaattccacgtcattgtagagtttcaggtaaagtaatgactttttaagggcctcttcacctgtaatacgcagcataacaactggcattttgaataacagttcatcaatttctcgttcgattgtggcaaaagccacgatatctgtgtccctaaccaagcaaccaaaagcacgatgcttcacaaactgaggcgtgctgtttaagaaggctttgcgagcatcctctgagaggttcttgagcttttcaaggccatattgggcagtcacgccgatcgtacatggtcggaggtagtttggggttctagcagtgcagcggacatgagaaagattgagatttctcaagtggaaagccgagcgtcgccccttctttgtgcctgttgcaatttgcaagtcttcgcggagctccgagagcatatcttctcgcaaaaggcgaaactgattgtcaacatggccggcaatgcgttggccactggacagctgtgcgatgtcttcagcacggcgataaaagggtttctccgtacatcccatctcatcggccgtgggaaggatggccgtcaagcgaaaatcagcaaaatcattatcgtgccgaccacctgcagtgatctcagagtcttcgacggtggttgcatgtgatttcatctccagaagatatctaatcttgtggcccaagtttcgtatgtcaactgagggggaagagaaaagcgacccatccttcaaaacagtctgagcatcagctctaacgtccaccctacaagagggaggcaacgaaagcaactccgccatcaaccagcatagagtgtgggtcgcatgatcctccagtttgcgagtacggaacgcctccagaaatgcaccccagagggtgcgcggctccaagataatcagaagaagctgctcgagaaattggccgttgcagaggagcttgacttcgcggtggttcaggtattgaataaacttcgcggtgtacccgttgatgaaggtcggggttaggttaaacctcagtccatttcgcaaggcattcagagcgctttggcttgagatgattcgctgaacgacaatgctggggtcaccctggtccaaggttgcttcgataaatcgcttgaaactgttctgatcctggacttcgtgctttccctggacaacctctttgaaatatttggccagtcgctccgatcgaatattttgagacatgatagcgaatgagacttaacatagattgcaagatcaaagtggcagagacagatagaataaaaggtgtagaaagatatcagagtcgagagataagaaacagtttagattctgcattgccaacaaagcagagcacagtgagactaatgcagatgcagtctgccttgtaggcttttagctgataatgcgcagttgggctatgcgcagcaaaacccaacaaacgcaagaatgcgcaggaatagaccaatgcatgaagcacagtatgtgacgtggcgacaggggtctatgcccccgcagcataacgtgagacaacaaacaaaaagtacctaaggctttttttgtatctgtcgttgattgttcttctgcctacatacacatacttcgtcgtgctgcttcctgaccatcagagtctaccacgatgtctccacaaggaagaggaagaggacgaggacgaggacgaggacgaggacaatggagagaaagagggggagtatatgcagcccagaccagttcaccagcacctccgctaggagatatcattgtcacaatctaccacaatgaaatcgagagtccggcacctgatcaagatgaagacatatctcgaatcacgaacagtcaatatctgacatcctacaactggcttggtgggaagaagagaaagataatcgttccaggtaagaggataatttccgataaccaaggcactgttcattaccattgcgttaactgacatattcctaggtgaaccaccaaagtggacgcctctgtccgattctcccgcgcttccacaagacaggggtgattattaccgtgatcgaaatgccgcacgataccccacctatcctctggagccaatggtacaagcaatactcacagacaaccccgagttccccattaccagtgtggacatcattgggtgcaacagtacaatggggaacctgcgacgctttgcatctgggcagggtaagccctttaggatgctagttgaggtactcggcaagacagtattcttcatcagaagggaaaattcgcccactgaggtgtttcccgatattcacggttatgggcatactttcccggaagcatacaccacgtggaatgcaagtgtgggcggatccctgtcccaccaacgggtgatgaagtatgattttgccggaatgcagtgcttggtacgttttgaaggggacggctttttgcccgacctggtcctggataccgaaaccgaaggacatcctgttaccccgaaggatagtatcgacccagaagctttgctgtccatcgagaaagtgacaatttcaggttacccctctgccattacagaaatggcaccggagcagcttgacattgcaagacaaggccggcgcattccacagtgtgcagtctttgacctgaagactcgatctcacgctaaaaagggcagtgacattattgaggaagaactgccccggttgtggatttcgcggactcccaacttcattctagcccaccatacagctggtcgattcaagcatattcaggttcgcgacgtgcgggatgatgtgaagcagtgggaggagacccagcaaccggctttgggcaagtttgccagcttgctccaaatgatcgtggaattcgctcggagcgcggataacggaaaacttgagattgagcatgaagagggtgagcaagttttgaatctgagagaacaggggggagttgttcatggcgtcttgtccccggctgtcgcaagcaagtgggatatgtgaaccggctctctcgaggataattggtttaagctactactcttagtttgaagcttgctctgggatgtaaatcagttcaatacaatccaatctattcacttacaacaaccgactgtaaagccatcagtcttgccaggtgtgcgcaagtatggcatcaaggctggcattagaaagcagaagtgtcatatcttgactgttcatggtactgtttaacaattcaacttagacacagccctagacttgagggttcattgccatgcccggaatagcagagtgtgcaagtgtagtaatgagtgaatgaatatcgtatatttttcgctgaagggaatttctgcctcaatttcaagtgctgatatggagttgatggagcaactgtactagcaagttggaattgacatcattatttcggtcagaattcacgcccttgccgagagatgcgctgtcttgtcaaggttgttggagagccgataagccactattttgccacttcagaccgcccgacaaccctcaccaccgagctcctaacaacttgccgatcctactatctcaatttctctcttatttgcgtcaccgaggtttgacttccgagattctacctcaaactacgctattgaaaatcaggacagtttctgctagccaagatcttcgtctctgaacgagacccatcccgaaagggaattttcctttttcgcgcgacgacagcaaggtacttgctgcagaaaccggcaatatgcccaaatataagtagcctctggtctctatatttgcaactgaaagctaacttcccatgcactcttctgtaggttttgccgcaaatccacatctagacagtgtcatagcctattccgggcatgatgcgacacgaggctatgcgcctcattgcggccggctgagcccatccatcgacatattgctgactcctcacttcaacttctaggcgactactgtgatgtctacctgacacacgactcgatgagcgtacgcaaggcgcataactccggtcgaaaccacctgagaaacgtggtggactactaccaacgtacgtttgaccgatggcgcagcaaggcgcccaacccaacaactgaatgatagctaatcatgtgaacccatacagagatcggccaagaaaaggcccagtccgtcatcgactccattacctcctcctacgccgcagagggccaacaagcccccaacatgatggcccccagcgctttccctcctcccttcggattccctggtatgactatggctcttcctcccgggactccagaacaccaacccgaaaccgaaatcaagctaacgccactaggacaaccaggcatgccccctcctcccttcggtatccctccaccaggcgcccccggcgccccaggcatgctccctcgtatgtcacacccacttccacacccacccccactctggcttcccgaggaccccagccaaagatatctagcctacccaggatcataccaagctaatgactatgcctcttacccagcccacggccttcccttcccgccgcccttccctaacgccaccggaaccccgccaacaggcggcttccccccgcctctccccaacatgccccagggcgcaaacttcccgataccgccccctggtggcttcccgaacttccccatccccccgcccggcgttgctggcttcccgcctattcctggtcagcacggtatggcgccgggtggtccatcgcctattcctaccggcccccgtggcttggagggatatcctcctccccctggaggtggacctcctggtgggatggatcaacggtggtgattatgatcacgatcttggggttgattcgcacgtggattgtttctgataccttttttttcccgtgcggatcgtcggcatggcatgacatctcatgggtctttttgctctttactgttagtgtaaaatagcggtttctttttttacgtctctttactgttctgttcgtacgttctgtttcgtacaaaattgtcacttggtttctagtcgatttcgaaagacatggcgtctgaattctttacgatatacatggcactgaaacttgcaaaagaaaaacttcgacatccacatccatgtagacatcggtttcatatttacactaggattatctccagaatactggtgtataaagtgagagatgctgcccaggtgacgaccggagaaattggaatatatttcatcggcagcagacatagtgcaaagccaacaaaaagaaacgagaacccccaaggccaatcaccatacccaaatgcatcaaagaacgcccagcggaagtgaaaacaagggaaagacacggcaaaaggatttagggagagagagaaggagaaaagaagcgaggagaagaagtaaagggaaaggaagggatagatgacaaaaaaaggcgcacaaccattaagaaatggagtggattaagaaaagaagtttatctgagcgacgaggatgctgcagacggtgcgcagaagcaaaaaaagaagagaaaagaaacccgaacccagaggaatggcgaatggaaaaatcatagaccatcggtatcccgcgctaaaacaaaatcacatatcttcatctcggaagcgacaaaataagagaccaatggcattttttaatgatcatagccagcgcctcgttgccaaggactggcactgttctgggctcgatatgtcgttgacaaagcagattggccaacaggagaggtgttatcaaagctccttggcgcgggtgaaggggaccggccgtaatggtcgtatccggggggaggattgtgatgacctgacgcgttgctggggaacagtggcacggatgggtcaacgggtgaccgaggcgcttgggcggcagacccgtgcagggagtaggtcgattccattgggcggccgacggtagcaccgtttccactggagatagaagcgctatcgtcgtcgaatgggttgttattattatattgtccaggcttcatatcaccacgtgcggtagcacccaaggcatccaattcagtggtgagctgggtttgagacttgatgaacgagccacggtcgtcgcgcatgggctggtaacgagtgtctggattcttcgacacaacggcgtatatcgaggcgagcagaaccaagatcaagaggaccaaagaaaacacggcattgtaaacgaagaaaatgacacccataacaccgatcatcattccgggtgggtcgaacacatccgagaacacgagcaggaagatggagttgatgaaattgatcaccgcaatggagatgttgaaaacgttggtcttcttatccatccaaggacggagaatgcagaccgcaacaagcatgcctagctcaaggaccaccaaagccactgtttgaacgaccggtgcttcctggctcagaccgatgaacatacccttgatcaaggtgtagacgaggaacggaacgacaaagtagtatgccgttgctcggtactgcacatacaaaaaaccccacttgttcagacaggttgggtcggagtaaagaatatatgccgggttcttgtgcatggtaactgaacgctttgccaaacggatgaccttctgagaggcccaaccaagagagacgagcatggaaaggagcatgaccgctgccaaaacaatctcggccggcgagtcacgctgggtgaactcccagaggcaaaggatagacatctggggaaacccgatgagagtcaatcggaacaagataccacgcagtacgatcttccacccattgcggaagtcctggaaccggtcgctcttcattttgccatgcttgacaagtaactcagtaattcccttgaagagtgcaacgatgatgacgacaatgcaggtgaataccgcaaagaaaatcaggccagtgaggaaaatgttggtatcctccatgtccgcacggaatccaacacgatcaattcctcggatgacaagaagtttctggcttgtctcggctctcttgactataccacttcctcgcttgacaatcattggtcccacggctctcctcatgaggttcatggccgggtcaaccaaggcacgcttacggcgcctgaggacttccacagaagtatccgaaagctgtgataggactgtcgatggagttccaccggttgatcgctgataccaggtagcaatcgtctggatgaatcccacgcggatgatacccatgctccattggaagttctgggtccaagcttccacgatcgggggcatatcaacggaggtcatgccaataatcgcttgggactgcatgaatccgaaaagagagagcgcatttgccgcaacgtgggctgcggtgttggaatgccctaggccggaggtgatagcggatgcagcgagacctaacccggatataacagcagttgtccacgagactccggattgattaacggtcttgccgttggaaagtgaggcctcgacacaagcaatcttttcttcggtgtcggctgtcctgatgacaatccgcacttttgcgtcgagatcaggcacactgaaggcgataccagggatattggctgaagtgcctgctgggaggtcgagagaaagtggacccaaatccatgggtccagcggacatgggacacatacccatgccactaattttacaaggattaagggtgctctgatatgcctggtagccatatgcggtgaaggtcatctccgcaataaccttaccctcgatgtatgagacgccatcgaagccgaccacgagggagttatttcctgggtagaagatgacgctgaaatatgttgccgtgaagttgctactttccatgcacacgctgagtgcattggattcaaggagttggacggcagaggctagcggcgccagaaaggcgacgaagcaggtgagaagagatattacccgcatgttggtgtatattcgatataaggaggaggttgtgaagcactggataggttgccagtggtataccagggcgaggggaaatctgacaggtaccgtcagtggcactccagagtaccacgttgccagccgccggatgcggaaattttggtacggcggactattgttggatagccgtggggtcgacttattcctcgatgtctctttgcagacggaggctgtgctgtatgttttggcgcaaattgtcggaaagccagggttgaatccaggtgttttgcctttcactggggcatttgaatataagcggggcgtacaagtagttgtaaaggggttgatggaatcgaaagaagctgtattggtagatcaacgagagtgtatagcctgaatgagagtacggccgagtagggcgaaaaggcgaagtggtcgagagtgagtggactggcgatacacagtatggccaaaaaaaggagtaaaggagtaataggcttgaaatggtagaaagtggtttgtggtgaagataaacggtccctagattccagaagagaagaagaaaaaaaagagagacaatgagagaacgagggtgagagggaagagtccacgggttgttcactcagggacagtcgacaagggtccgtgggaacatttgaaagacattcgaggtcgtcgcccattccactggcaaggtatgtggtatggtattgtaccaccacaggggcggctatcggacagccaatcacagtgtggtattggccggtattggtgtttgagtttgtttcgtatgtctacccactggcaccccccttcatgccactttcaaggcttcctctatgtttcacttagtgtcctccccttctgccctttattgtttcactccactaacactatttatatgcatctaatcctcgattctccggtcaaagaaaccaacctcttcactttcggtatacgcgtactaacgctactgaaagcggttgatggatcgtggcggaatcaggcgggtccttggcccttggtcttattattagcagaagacaaaagtcgggataatgccaatattaagtattacactgcgccaaaggaacggttgcccccagctgtggagtgtgccgcatacagtggaccgccacgtacggactacagactacaatggtaactttcaatatcaacttaatataatgtatgttgtactctactctcctgggcattgcgtaagtatttcgtctgccttgtccctcgctaatgatgaatcaaatttagatttcagattcccaggtccacacctctatgtcgctgcctactccatacggagacggagtactttgtgaatttcttctgtcgggtggggcctcttagctgccgcttttatgagggcgcttctggattggcctgagtaactttcagtccggagagatgacttgctcgatatcacgtgattagaagtatggggaggttggtgctgatggacaatgtgtactccgtacagatgattcaagaattttgtttactatgctaaagagtcaagcagaactagcctatgaaatccgattttgattcgattgaacgcggctcatacatcaaatacataattcatttttggccgttttcaacaacctgctccgaggtggcctctcccagcgagagcaacactgccccagcttcattgcggtgcgccgagaccgcacgcctgttctcatatatggctctccatctcgggtattgcctagctggaaaggcacactatggtcgggcggggttggcaggtccggccatgtaagtcggttcggtgcgttgatatatctttccatgtccccattgcgtctcgcaacccattcattcaaaaaggtgcgggatttcgatacgtcagagtcaagttcacggttgcaagtccactccgatatactctgaaccatgtccatgtgttgatcccagtggggaatgctcgtgaagtgcgtatcgtttgtgataatctcgtatagcgtgaatacgacgccagtcccatcatcgcggctatctagcaagcgttcttttccagatacggcccagttgaagtcgaagagaaggatcttatttgtatcaggatcgataagcagattccggggtgcaatatcttgatgcatgatccctagttcgggatttaggaaatccacaagtcgggtaagctgttgtagccactcaaatcggaacggtacattcagattggttggatcggcgagagttccgcctggaatatactttgttgcgaatcctatcacccgagattccacgtcttcgagaacaacacgatcaagtggtactatattaggatgcgacggcagagccttgaggatgttgatttcgtcctaggccatccggatgtttaaaggccttgtatcacgttgaatttaaaggcaaccctctgaggagtcccagattcgtcttcataggataaaagatcaacgcctggtccaagtcgatcaatttcttcgagtttagagtaatagattgtacggcaattggaaagcagcaacgagggagcgctttaatcatcaagaagggaagttatgcaacaaataaagtgtcatcctcttttggatccattgagacttcagtaagaagcccatcatcgtggactgtaattgagcgaacttgcggtgacagatgatcggcgaattgcgccagaatgaggcactcttggttctcctctagcggtaacactttggcgctgcgtttgaccttgatcatccgtagttgatcccaatcccagatgttgcaatgggcttcggttaaggggttctctttggggccgaaatagccctgattgtcagagaggaatctttcttggggcttaatcatagcaaactaaaaaagtcaaaagctctgatttattttggctagtctccacgttggctgagtgggaaaggtaaatggattgcttaaccgcacggtacgggtgacttagtgggtgcggggacgatcaggcgcgcagtcagtgatacaacaggggcgtgctcgattttactctgagcaaaaggcggcaagagataaacactaaaatggaaggagagctaagagtcattggctgatatctttgccgaattttatgtttcttagttctagatccgggggtaagcctttccgaacactaatgaaatactagcgagagctcattaactatggagtactttgtagacattattgttcttagtctactctagggttctagagccgggaagaccgttggactctatttctaccattacaattccagagcacttccaatggtaatacacatgatatagtatacgtttctattaattttgagaagacacaagagaaaatatcatcaatagactgcagatgcatggtataaggatctacatggaaacatggaaatctactaaatagcgttcacacaattgcacagcctcgtttagcatcttcatctcggctcacacgtttcagaaataaagtaacctccatatgcatggaccattcgtgagcttggtatgattgtgtcaaatcatatccccttccccttttattacaaatttgttttattattcaacatcccctgatcaccaggaaatgatgatcagaacgatcactatttccatgtgcgcgtcataacctcttcatttcccgtataatctctgacctcaacgatgtataaaatttgtggtacaaattacaataaagggacctcgagatgccaggaccattgtacgatctagtgctagttatattttcgacgcgcttaaactatgggtggtctagctagaagttgtatagctggcttgcctacctttctaggtgtgaactaaacagaaacttcccataaggtaaacactgttagcacattgatctaacctaactaggataagcttaaagtattttgtatttttggctccaccgacattatctgattcgtggttgaatcattgaatatcattggccagaaatctctgccttggctgcaattggatttcgttcaaggtatggagcactgaggttatatatcactttgtttgtaattttatacttgtcttcagtctgaagcttcaatttgtagggagcaagaatactccatcatgagtggcttggtggtgtttttgagatatttctttgcccagccttcctcgaggtttctgggtacggagtatatatccctaaatgtcttccgctagttagtggtttagctaacactactactctgtagttaacttctagactgtcaagctagctaatggctcctatcggctcttcaggaatagaaacccggcttggctggtacctacaacaggtcttaaagtcagaattcatgcataaccacagagactctgtcggagcaaggatatcgaagaccattgcccctagacaaagacaaagcagcccagcccttggaataagacaaaaactgagcaggcactaacacatttcatacaacatacatagtcacagtaatatctcagttgcctaacttgaggccaacgtagccttgcccagccttgcacagccttcagactaacatcccgtccttgttccactaaggggaacccaccaggtgcgtatactgctcggcatcatttcatctcgggtgtaaaaaatgcctgatcattttcaaaatacgggagccttaaacttgaaacacatgtgatctttgtggtcttgaagtgtcacatccaggcaaggaacaatgccacaggagatggccaacctcgtgcccaaggtaggtgccttcgtaagcaggtcaataatatcagcctcattgttcaggcaccaactgatcgagtctatcaacacgtgatgtggagttctgccatattctaccgatcagaaaaaaaaaagtagcagaatgatttccgcccgcaaagatcaataatctagacctccaaaacacaaggtccaggttatacgagacaatccctgattgatttgttcccgtgtcaaatattacactgtcgcaggaccaatcaacaaaatgcctggccccgtggacaccgcgaagtccatcaacaagcgcaagagaaagcacggctcgaaagcagagagcgatgccgccaagcccgtggaagccaaatccagcccttcagtgaccccgaaaaagagtgttgcttcgaccccgaaggcttcggctgagaaaactaccaagaagcgcaaggtcagcccttcaccaagtgccgaggaagagagcgccgaggaagagagcgccgaggaagagagcgacgacgccgaggccgctgaagatgtcgaggtagatgcggaggaggagagtgatgctgaagactcggaggctgcgaatggtacagatcttccgactttggaagatgtccgcttgccccagaccgagggcaagctgcagaagttcactgagctcaacctttccgagaaaaccatgcagggtatcaacgacatgggcttcacaaccatgactgagattcaacagcgtaccattcctcctttgcttgccggacgcgatgtgctcggtgctgcaaagactggttctggaaagactttggccttcctgctccccgcgattgagatgctgcacgccctgcgcttcaagcccagaaacggtgagttttccccacacatttatctgatatttactttccattgagactggtggctaacctttgatgcaggtactggtgttctcgtcgtgtcccctacccgcgaattggcactgcagatcttcggtgtcgcccgtgaactcatggcccaccactcgcagacatacggtattgttattggaggtgccaaccgtcgcgctgaggccgagaagctgatgaagggtgtcaacttgcttattgcgacacccggtcgtttgctggatcacctccagaacacccaaggattcatcttcaagaacctgaagaccttggtcattgacgaggctgaccgaattctcgaagtcggcttcgaagatgagatgcgccaggttgttaggattctgcctaaagaagaacgtcagactatgcttttctccgccacacagaccaccaaggtcgaggatctggcccggatatctctacgccccggaccgctttacattaacgtcgaccacagcaaggagcacagcacggtggcgggtttggaacaaggctacgtagtgtgtgaggcagacaagcgtttcttgcttctcttctcattcctcaagcgtaacctcaagaagaagattattgtcttcttctcgagctgcaattgcgtcaagtaccatgccgagcttttgaactacatcgatctccccgttctggagctgcacggaaagcagaagcagcagaagcggaccaatactttcttcgagttctgcaatgccaagcaaggtaccttgatttgtactgatgttgctgctcgtggcctggatgtacgttccctaaccccattaccacgttgattccataattgactcaaattccagatccctgctgtcgattggattatccagtttgaccctcctgatgatccccgtgactacattcatcgtgtcggacgtaccgcccgtggtgccgaaggcaagggtcgcagtctgatgttcctccagccttccgaggttggtttcttgaagcacctcaaggacgcgcgtgtgcctgtcgtggagttcgagttcccggcctccaagattgtcaatgtgcagtctcagctagagaagctcatcggccagaactactacctcaacaaggtaagctatcttcccttattacttatgtgttaccttatactaacccacttgtgcagtctgccaaggatggttaccgttcttatctccaagcatacgcctcgcactctcttcgcaccgtgttcgacgtcaacaagcttgacctcgtcaaggttgccaagggcttcggattcaatgccccacctcgcattgacatccagctgggcgccagtctcagccgcgataagaagcaggagcaacaaggacgccgcacgtacggcagtcagcctaagcacggtgctggactgaagttcaagcggaagcacaatgactgagaacaatctgtatgaacatcaaaagcgatcgattgtctctgcatatttattttagggacattggagttcagcaatgtggatatatctatttgggtttcaattttgtccccttattctgtaatcatgagagatggcatccgagttaaatattcggtgggatagtcgaatgtatcttgcttatatggataactctcttctttgcacctccttgcgccttgtaccatggtttgtccataccgttacacggtaagcatatgctcagcctagaggtctgcccgatatatgtttggtcatctacatcgccgcaaatcgtacaacatctaactatataatgatcgtaaagcttattccttgtcacggaatgccacagccagcattcattgagccatgtgggattcaaccttttcccacgtggaaaggatttgacttcaaacaagaagaggagagctacagaaaaggtatgtgcaatgcaaatctctatactaaaggatccttactgaagtactccgtacatattggtacctacatgtagtgagttactcaaccccccatacccaccgaagcgatccaattggaagatgccaattctattgtggacaagcgatcgttgccaatgacaaagtcaagcagctcgattgccactaatgtacgagatgcagcaagtgctcaacctccagctgcgccagtagtctggatgtgaattgcttggacccccttgcaagcgctactatagttctgtccagtcagaggtgagatcacggatagttagttatgttgtaatgcatctggggccaaaagttgggaaatattgccggtgtattattgtgtatctgtgcgattgataggccaatcatttcattgattccaccaattccaattatcccaacatggagaagtcggcaaggtggaagcccgagcacacgagtgtgatgagttggcagacgctgagcccaatcacccgatcttgtccagggtctctgtcgtctgggcgacggtgtgtgcctatttcggtgttttttcgccttgtcttttgcgggtccacggagaactgcaggtggaccgtgtgtgatcgtgtgtgacgaggacaccaaagcgtttcgccgggtttgtgatggggtgtttgggagggaaagttgggttggggttggtctagagggctggagatgcccaattcgcccagccacgacgtcctcagatgttgagtatacagagcagggcctggaggtgaataaaataaataaagtaattgaagaaccaaggaaccaaagacgatcccgaacggattccagggttccgtttgtttacaacgtccctatcttcgtcggtcacgggtacacaggtagcggtcgggtactctttgtatggtggcccacgcggctcggaacctgcgatgtacaatcgccaacacatccagcctcttcatttttcgtttttttttttctatgaggctgggcatcttaattactcgggtaccggctgatattcgcctgacttatcctttgcttcatctttcattcctagcgattctgaattcctttccccttttcctctctcgcattttcatgtgagggatcggcgagcttcgacagcaacacttcttgggcaccctcaccgttgcttcctctctctccttcctaattctccccattcttaattcttccccactgttccgtggtctgcgctggtacgctctcaactcctatcaaaataattctcgggttctcttcttgggttcctgtaatttgtccttccccactatcgtgccaacaagcacggagcaacagtgatcaccctgacaacactcccctccatcaccctcggtcgagcacgacggagcatgcgattgggttgaaggacgcctcaccaccatgggggtcaacacccgcaaaccgatccttcccgcccccacagaatccatcatcgataccacgggggacagcgcaacaggcacagatctggcaactgacctttctcgccgcacagacaaaacgtcgtactccatcccagacgacggtagccccgtcactgtctccactcggcggcagcgggaacgcgaggaaaaattgtctcgagctcaacaggactctcacacctcattactcatcgagtatttcgagggcggcaaaggttcaagcggcattgtctctcgtcctagtgtgcgagtgcgtgtgaccccatcgtcagctagaaagtccagagataagaaagaccactttcaaatcaccgaatcaagccgaagccacagccgcaaaccgtcatatacccaccggatatccctaccatcagcatccgcaaagcagaagcaattggaatcggaagcggatgaccagagctttagttcgaattcagccgaggaagaggctcattattcgtcacgtcgcgatccggtagatatcgaaattgtgaaccgcggacagggtagcgagatgtcttccatctcgcaagataatcgatacatgaccaacgcctcagaggtttcgtccatgccaccggacagcatgatcaacgcgtcgtcggctggtcccaggcggaaacgcagccagagtatggagcgtgatgccgacgaagataagggattgctcaagacccctcaccgacaaagaagtcgcagtttaagtcatgagcgaattgcgcatcgcgtggcagaaaagctcaccgagtcaccgcaagaggcttcgagcggcagacacagaagcaagggcggcaaggattacctcgaagccgaaacaaaaccatcccgtcgccgaacgcgcaagtatgcggaagaggatgtcaccagtcctgactctagtattctcagcacatcgggagtctcttcaaaccgcaagtccgatcagtactcagttcgctccggtgcatccaaatcctctatcaacaatccaaagttactcgagacggttgaagatgcgatcagaagattaattctaccggagctaaaggaactcaagaaggaccaaaaagtaatgaccaacaagaacaaattcgatcgggacgtggctacatctcattcgtctggcacgagctccagagatgagctaggtcgacgtctctccaagcacgccagtgcgccggatgttatgccccaagttgttctgaacaagaatagcaaagacgaaggcattgttctttctcccgaggcggccccacgcagtaaagaggtcaaggaagtgaaggaggtcaaggagcgtaaaccaagcaaaagcagcgaaagctccgaactggcgatgagatgggccaatcgacccgacttcaccgaacaagacaagatccgcaggcagaagagcaagggtctccgcgacgcccatgctgctgcccgagttgggtctgctcttacggcagcttctttgaaacaccacgattcgaactctagtctcggcagaaatgatcgccgccgagatagtggctctcggaaaagttcacgcaagagtaccgagagtatgaactataacgaaaccgagcttgttttccagaagcacaatgttgcgccaatgccaatgcgcagcgagatggactccgagttgaccagaaactcgctactctcggagcgaacggcaagtcccactcccgaaaaacaaacctcttatttcgacactactcgcggatcgccgaggcaggccatgtcgccagcttctcgcactcctactagaaattctgccgactcgcgttatgggctcggaatgcgccatggcaatcagtcgcaacataatatttcggtgcacagtgcttcggagcgcgaccttcatcaccagagccaatcccctggaaccgatggtggtaaccgggcaattgcagctgcagccgcagctaatctccttgatgctgctcaccccggacatcatgaaacggaagatgactatcacaatgggaccaacagccgcggactgagccccattcagagtcttgcaagtgatcatactggaattcgccacgatcattactcgactcacagtgatcagcatgtcgacggcaaacatgagatggagcctcgactctccatagactctctgtcatccgcccccagtacaaacctcgcgagatccactcgtcagggcactagctcacacagccagagtgcaatctttaagcagcacagccaggaatcacctgggctcggatacgaacattcgcgccagggctcccaagacgatggcttctatggctatgacgaggagagcagacgctctcacgacgatggggatagcgatgttgacttcatggagaaagtcaaagaaggccaccgtgtgactaccggtgctgctgccaatccccaatttatgcacccgatgcccgtcgaatctgcagtcgcttccttgatggatccatctgtccttgattctcatgtctcatcgaaccgctcgcaaacagatctaagtcaacgaccaggcaaccgaagccctgaaaagccaggaagcgaagtttatcgcggaagtcctttgaagcaacgccaggatgctttcactgccgatgagacctcgttcccccgacgcatgggtgccacatcgccccctcagagcgttacccagtctttggacgatatcgacgactctgctatgatggatgccaatgtcccacatgaaaagcaaagtcctcacacggatgctgaaagccaagtctcagagtctgaaatcaacaccaacccgtccattatacagggccccattggtggtgtcgctcaggcagaaaactggggatatgattcaagatctccgccaccggatcactactacgatacccagatcggcggatctaagggtctcaatgccgagcagcagataggacttgatgcggaatactaccagactgcccagaatatctttggcggtgatgactactctgcccactctggcgacaaccaggcccggcaatcgtttggtacccctcctggtgccaaggacgaaggctacgtttcggctgccaaccctatgtctcctagcatcgggaccccgaagcaagctagtcgaggtcttgccggcgcggatgccgctggaatgggtagtttcgatagttctgccggggcagacgatccttttgcctctggtaatgagcgccacttcagtggctactctcacggtgttggctccccactctacgacagtgctaccggccgaggcattgagagaattcagtcccaggacattgtggctcttatggatcatttgactgttcgagacgcccagcggaatgccagagataccgagattctgattactttggtccgaagtgctgctgagatgcgcacttcctttgagcagatgaggagattcatcgccgaccaagatgatctcatcatggacgtgagtgacaggggacatgagcggactcacagggcgcttggtggtccgcgaccattaccccccagtggttctcggactcggcagctgaacgctgaagaggaagataagcggaagaacatcttcaagcgtgcgctcaagggattgagtctcaagtcgggcagtgatttgaccaagattgagggcatgctcgagcacctgcttgacgaggttgaggccctgcgatccggacaagatggcctaagccctcacggtggtaccagaatgggaagcatagagccaaatgggtacgagactcctggtccgaatggtgtacctactgagacgagccgctcgccctacgggtccggctcttctcgtccagccaatgcgcagcgcagaaattcggaccagcgagtcagcaccgtccatgaagttgacgaagaccttgagcttgacgagggtgaccagtttctgacttcacatctccctgtccgcgatgcgccccatcatgagcggtcgggttcattgccgcttgacacgcccccacgcaagccagtaaccacgtcagctcgtagcaccgagacaacccccaaggctcgcaagcacaagtccagcagctcgtccattttcccgaagatctcgcgctggtctaagtccacggcgacctccatgggcgacggtattcgcaacagcatccagccttcccgcaaagagcgtccgacctcggatgagtctcggtctggatctgatctcgcaccccagggagcgtatcatgatccccaaggggatgacagaatccgatccaattataccttgaacgaagagcaagatgagaacagacctccttcaccgctagtgccttcccaggtgtctgaggcgcccaaataccgcggccaccgtggaagtctcgagctgcagcacccccagcctcggcaaggcccaaccgcccgttaccagtcccgcctcgaaaccgaggcccaggtctacggaggcccggtttctcccactggctcagaacagtgggattccaaccccagcctggtcaacccttcccagaaccgcaacagcggtgccgcgcgcctgtccccgatctccgacgcaggctactcggagaccagctcccaagcaacccgtacaccaggtccaccccgtcctcctaaaatcctcgattcgggtcctctcattcccgagcgtcaacccaaagcgacggataacgaggaaccagcttacagcggtgaccgtgttgtttctagagtatgtattcccaaggatccccgctaccgtttcagttgaacaagttctaatctccactcttcagagctctgccgtctgctcaccccccactcgcaagccaactggcccgcgtccccttgcatctgccggctcctacagcccaggcaatatcaagcgaacccgctaccgaggcagtcccgtgcaaatcgactatgacgatgagtagtattgagacttgcattgtgatacccctgggttgatgttttcaatctccatttccatctagcgcttttgccttttcttcttgctctttccttacgacagttatgaccgttccctgggactccggtttcagttccgttaaccctaaatctatgagcaatgtgtgtgcatgtttaaatgtctacaatatttcctgcctttatgttttatgtcaatggccatgagatgagcgggaagttatgtcttctcttcgcctctctgactttttccactctaagtttctctgcttatttttcatgctcttgcttccggcatgcagctactctcgcgcgtctactaagcgtgaagcctattctttgtagcttttgtgttgtggtgtagatagtggtgcagaagaagacagaatatattacaagttcgaggtgtggaattatctttcggttcttttgtacctttctgttgatgccaagggatatgaatgccaaaggttggttctgtatatgctcgctagtgtagtttcgagcgattctcttctaataatcaattcgtaatttgcatctcttcttcgtcttggaggatgtctctggcgtatctccttacgcattatgcataagccaaattgaggtctggtcacgggccgtgccggtgtgtagatcaaggggccaccttccgtcactcatctatcgttatctcgacattcccatccatatttcgacataaatccaacgctctataagaaaaactggcgttatctcagagatgctctcgtcttttcttaagtccttgccccggctcggaagaagatggacacctctcaacttcaccaatcagaatttcactcggataccaacgagccatgcaatcgaggaggaaactatcccaggctatgttgctggtcggtattatcctactcgaatgggggaaatactcaaggaccgataccaagttgtggggaagctggggtttggagtcagctcaaccgtgtggctcgcacgtgatatagagtaagacgacgatacctttacaactccttcactcactgaaaatatagctatcgtcgctatgtcactcttaagattttcataaagtccacaacgatgggccagcaattggatgacgagctgaagatatacaaacgtatcgaaagcgctccccggaatcacgcaggtcgcaagtatgttagatctctgctggactcctttgatatcagtggacctgaagacaaacatcgatgtctcgtgcatcccccgttgtgggagagtatgttggatttcctgttccgcaacccggtgcagagactaccaacaccgatcttggcagtgacgcttcatcgtctatttcttgcattagactatttgcatacagaatgcaagatcatccatactggtgcaattttctttccccagtcttgagatcgatcatttgcttatcaatatatcagatatcaaagcagataacattatgttcggcattgctgatgattccgttttcagagattttgaaaacgatgagcttcaagatccttgtcctaggaaggagttagatggaaggacaatctatacctccagcgtgcttagaacgcctaaagacgtaggcgcgcctgtcctctgcgatttcggctcggctgtgatgggcgacgaacagcacaccgaagacattcagccggatatatatcgagcaccggaagtgatcttgcaagttccatggtcatatagtgtcgatgtatggaacgtgggatgtgtggtaagaaagcctatacttctgatgcaaaaaaagtgaagttttaggcttacgttgtcagatttggaaccttttcgaagggggatcgctgtttagcggccaggacccagagttcaagacttataggagtcgagctcatcttgccgaaatgatacgcctgctcggtccgccaccgccaaacttccttgcccgggggaatcacacgaaaaagttcttttcagaggaaggtaattcatctatctgtcattttcctacctatgactagaaagtgtcaattattgactgtttctgctattctaggtgactttctcattggaaaattagtaggagaacacgtaccaatcgagcaaagggagactagtctcgagggagaggaaaaagagatgtttcttcgcctagtgcggaaaatgctacaatgggagcccgaaaagcgaagctctgccgcggaactcgaacaggacgagtgggtgcaaacagaattacgtaaataactgcatgtccttcagagtgtactataagaaccacacagagtgcgaagcgcatgcgaatacaccgatatccccactcctgctcatacatggagaagtctcccctttaagccgtgacgcgtctaggcagtcttttagggcattagcggacctgcagcggcgatccatctgcattattacgacaattccgacatccgattccgaacaacgatttcccttgaataaaaatagagaatgagcggtttgagttccaaggattttgttcggcgtctcggtatctcggggctcggagtgggtccgccatccgaagtatgcagtatcccgagaaatctcatggatcggcttgtgtcactcaaatttgatgtgtggcgatccgaagctgccgccgtgaagactcctaaaggaatatttaagctggataaattgccaagggctgccctggttcaactgcacttatcacatacacaatctccatccacgaagacatattcacaatggccagcattgaacctcacctctgcttccggtcatttgtcgaagccttgaaggccgacaatgatctggttgagatcgacactccaatcgaccccaacctcgaagcagccgctatcactcgtcttgtctgtgaaacgaacgacaaggccccgctcttcaacaacataattggtactgagaagggtcttttccgcatcctaggtgcccctgcatctctgagaaattcctcaaaggatcgctatggtcgacttgcacgacacttggccttgccaccgaccgcatctatgcgcgacatcctcgacaagatgctctcggctggcaccccgatcccacccaacatcgtgtctaccggtccttgcaaagagaacttcctcgaagaaagccagattgatctgaccaagctgcctgcgcctctgattcaccaggctgatggaggaaagtacatccagacgtacggaatgcacattgttcagtcccccgatggatcctggactaactggtctattgcccgtgctatggtctccgacgataagcacctgaccggtttagtcattgagcctcagcacctctggcagatccaccagatgtggaagaaggaaggccgcgacgccccttgggctctggcatttggtgttccccctgccgccatcatggcctcgagcatgcccatcccggatggtgtgtccgaggcgggatatgtcggctccatgactggatccgccttggatctggtaaagtgcgatactaacgatctctacgtgcctgccacctctgagattgtcttcgagggtaccctttctatcacggacaagggtcccgagggtccttttggtgagatgcacggctatgtcttccctggagatgtccacctgtgtcccaagtacaaggtcaaccgcattacctaccgcaacgatcccattatgcccatgtcatcttgcggtcgactgaccgatgagactgtaagccatccatctccatatttccggatccctactaatagtattagcataccatgatcggatcactggccgctgccgtgatccgcaagatctgccaacaagccggtctccccgtaaacgacgccttcgcgccgttcgagtcccaagtgacctgggtcgccctgagaatcgacaccgcaaagctgcgggaaatgaagacgaccccgaaagaattctccaagaaggtcggcgacctgatctttaactccaaggccggatacactatccaccggctggtgctttgtggcgatgacattgatgtctataatggcaaggacgtgatgtgggctttctcgactcgctgccgtcctaacctcgatgagatcttcttcgaggatgtgcccgggttccctcttattccatacatgtcccatggaaacggatcgccagtgaagggtggaaaggttgtttctgatgctcttctcccctgtgagtatactaccgggaaaaattgggaggccgccgattttgagagctcgtatcctgaggcggtcaagcagaaggttttggccaactggacgaagatgggattccgggaggagtaaatcaaatgtatatagtactttgttacctcaaatgtagattggaattttgataaatacagtatataaacttttttggtaattcgggtatatccccggggccatggatacttgccaagcaaccatggccggccccgtaccggtgtaagcccccgtgtaacccgaagtgggcagttctgtcaaggcggaaacccaacccgacctgcgtttcgccctacatggctcagtttagcccatatcaccctataccaagctcggatgcgtgttattgtattgaaagagtcacaacctttcaaacgacacaccttcttggccaatacaacaacccctgataatcccggtacctcggagtcctcggcagcatgagcgccgtcagtcaaagcgaagcagaccgggtgctacacctcaagagccgagagcgagaggctcatgcatgctacacatgcagaaagcggaaagtcaaatgcgatggaaaccaaccatgtcgtacttgtcagaagcgaaaacaccccgaaatctgcacctacgcccttgcacattcgaggcgcagatcggcttctcgccacagtgtcgctcgctcggcttcgcccagatcaccggccgtagcaagcaacgaacaagcacggcctgatgatagttcgaaaaattatgtctattctggtgacaattcggttgtttcgatcctgcgcatgcgagcatcggacgtcaatggatcggtggcccgcgatgttggatctgttcttggtctgcagaataccttcagcaattatatttttatggattcgaagacgccgcttgagaggtggaagtcactgctgactgtaatgcctcagagatcagaggtcttgaagtaagttgcaaacaactaaaaaggaatacggctgactggttagattctttcacttttatcgtgtcacagcatatccattcaatccaatactcgctgacatagaccgctttgaatctgatttatgcacctatctcaatgctcacgcatctggtgaagtacgcgacccggaaaagatcactgatcgctgggcaaccgacaagtctattggccatatcagccttctactagcaacattggcggcaggggcgcattactccgatactgaataccccgaacgctttgaactgtcaactgactttggtaagcttcatcgcacgctcatcaagcttggctaacggtatccagcccgtcgatcatttcatgctctccgcttggccaatttccttttccgaccatcactagatattatacaagcgctgcttatcttggggaatacgctgcagaatatgggacagtccgacgccgcctgggcgttactgggaacgacgatccgattagctcagactatgggcctacacactgaaaggagtactgttcactggccggaaaatgtgagaacgaaggccaggaatctttggtatggaaatcagactatatgcatacctactcgacaactaacttcccacaggtcaacaattgtctggcaggatagtttactgtgcctttgctatgaccgaccgcctattgtctccgtgactggctggtctcccgttaactcgtttttcgagagacaagacttgtccttcgcagaagtgatgtactttatctgtcgtattggtctagatactatgcgaccggaaagcctcagcgtcgctgaatatgaactagcaatagaagggttgcgtcagctagattatgctcatcaacgcggtctaccacatcttcgatcacgggaaaattgcacaacactacaacaacatctcgagcatttagctcttagaatgcacacctccttttgtgtatcggttctctgccgaccggccatgaagcagtccaccccacagccttttctccaccacgctgatattcttcgggcgcgtgccaaaggaagcttgatcgatgcttccagggcatttcttgattttcaagctctaagtactgttccattgcggacctggtcaatggtgcatacagtgttgagttcgaccctgcttctctgcatctgggaagagacgcgcaatgaccccgaatgtcgcaatcttcaacagaaagtcatcgacgtcttctcatcgtctaattcaggaactaatgacgatggtgcttcttcatctgaaagtgatagtcagtggttatcggctcgtcacatccgagccttggtgactttacgaagcgccttggatcgagagcaggaaacgggcgctaccgaaacagagaactgggcagaaatgacctcgaatatggtgccgcaatttggtcctgggtaagtttcctgtccgtagtgaagatggatgctcacatctgaacaggcccatggacatgcccaacccattcgatgtatcacctgtcacatatttggactcgatcatgaaccgtaagcacggtttgcctggtttctattaacaaaagctgacatctcacagttccggtctttgattatacacaggaaaatggatttctgtgagaaccttaaagccgataccctgcgtgcggtcatgagggccagacctagatcaattacgttttcacaaagcataggcacatacagtaattacccatccaggctttcttgcagatcttcccatcgatctttccctaaataagtggcgccactgtgtaatggccctccgcaaaatcatcggctctcggcctcggggcctcggacgactcaattcggagtctctaaaatctcaatgacatattctcctgtttttcgggccatgcgataacttctagtaagaaaccccgcgcaacatgaatattcggcatcttgccgtagattaatataaaacaagccagggttgctaggctcagttcattcatcacacctatcttcacagctccacgcatcactcaacaagaccgaaataacaccttcaacaaacctcaaaccaatgctttctcttctctctggaacccaaaccccatcttccagtcgccattcccccggagacagtccaactgaaacagccatgccagccatcgatcaagcccctcaacaaacccgacgcagacgcatcgtggtcgcaatgaccggcgcaacgggcgcaattctcggaatcaaagcgctcattgccctgcgtcgtctaaacgtggaaacccacctggtcatgagcaaatgggccgaagcgaccatcaaatacgaaaccgactaccacccctcgaacgtcaaagcactagcagatcacgtccacaatatcaatgacatggcagcgccgatctctagcggatccttcaaaaccgatggcatgatcgttgctccatgtagtatgaagacactggctgctattcacagtggtttctgtgatgatttgatctcgcgcactgcggatgtcatgttgaaagagagacggaaacttgtcctcgttgcgagggaaacaccgcttagcgatattcacctgcgtaatatgctggaggtttcccgtgctggtgcgatcatcttcccgccggtgccggcgtactatatccggcctgcgtcggtggacgacttggttgatcagagtgtggggcgcatgctggatctgtttgatttggagacaggggactttgagagatgggaaggatggcagactcagaaatgaaggccagagctgggttggttcgttttgtcttgcatttattggcgttgatatagactggtgtactcgaaaatttacagtgcttttcatcgacgtcagctttctattcccctcattagatcgatatcgagttcagggtaagtcctgaaactggtgaatacagccgatatcctgaattacttcctggtatgtcccatagtagtcacgcggaaagttactaatttccaaaacccggcattactctacccgccctgtatccggtggttccttccagatcaacgaggataataattgggaaggcgaagaataccaaaaaggaaggagctactccgtagacacccccaaagtcggctctttcctcgggaactcggagacttcggaggccttggaaccttagaaccttataattgttcccgcggctccacttgcctaacccttcttcaacctcctttctctctattgatgtctagtatcaggcacactgctcgttccatcatgtctgctattgcctgcaaacatcttcgtccgcgaaagttcgcacctctcggtgtggagacgtcatctatccctctcctgaagggaattgtgtttgatgtggatgggaccttgtggtgagtcattctttattctttctcttcctaatactctatatatgtgctgtagttatttcccttgttgtatgtttgctatttgcgtgcaccctcgagagctggtatctacatcttgagctattatttggaagtggccggcctgggggcaagaaatgaggattgaggcatcaatttgagattcaggcagaaacgatttcctattcaggaaaatatacctgcttgcgcaggttagatgataagccggtctgggacgtagtagttgagtggaggcgttccctttctcttcgggctttatatcgtattccatctttttcgtcttgttgttttctatttggtattggggcgattctcatgataccaagctctgatcgtgttatcaacaacagtatattgaccgaacctcgctaaccttgaccagcttaccacaaaactatatgttccgtcagatgaggtatgctctactgcctgcgagccattcaaacccctctgtaacaaatattccactatagagaagcactaggaatcgacagctccgtcgatatcctccaccacatccgccaactccccaccgaagaacaacccacagccgtatcgaaggtgcaagcagtagagcgccgagccatggccgaccagcagccgcagcccggcctggttctcctaatggactaccttgaatcccgcggcgtacgacgagcgctctgcacacggaacttcgagtacgttgtagttatcaacgcaaccttccacatgcattctagatacgtactgtaatgtgcacacaacgctaacctatattcgcatctttagagcaccagtccagaacctgattgacaatcatctcaacggtcatgtcttcctaccaatcatcacgcgggacacgccaaatctcctgcccaagcctgatcccgccggcattctgcatattgcgagtgaatggggtcttgatgatggtcggaatttgatcatggttggtgatagcattgatgatatgacggctgggcatatggctggcgctgcgacggtgttgcttttgaatgagcataatgtgcatttgaaggaacatccgcatacggatctttgcattaagcagctatctgatttgatcgatgttctggaggcaggatttgtcgggactagagagaacgatgagcatggcgcgtgatgggatctaggtggaggctgccggatggatattgggcagcatgggtatgtagtgcgtacaatataagaaatatacttgctcaagcgagagattttgaataaactgtcatttaatcgtacatacttgctcagctgagactgagcggaatggtagatgctgttgctggctttcgccgagatctgtcgctcaattctgaaggggtaaaacctccttcttaccacccgcggcttcggccgccgccaccaccaccattacgtggtccgcgtgagaatcctcctcgttgtgatccgcggtttcggccgccgcctctcggtggaggaggaccccgtggaagaggcgggttgggggagcgcgcgcgattgttgtttccagagaatgttgggcgaccacgagaaggccctctagatggtggatcaccaccgcgtttagctctgcttgggaccctgatggaaagagtattgccacgaggagcagggatggggcgtcctcggccgccgcgggatatgcgggacatcatgtcatcatcgtctggggatgggggtcgcgaccattctctgtctcgtccgcgagatcggcttggtgggccggtctctcgctgcgggaggacggtgttgaggtttgtgatcatatctgggtcgattcccttcaaggtaaatgatgatgacgcggctgttgcgcgtaagctgctagatgggcaatctcctacaagatgcttcgcactgcagcaattcgcacagcagattgacactatgacttggtcggagtgaagatccctccttgggaacttccataggaaatcacattcggcttccaggtgttcattgccgcagtagtcacatggcacttcgtaagcgaagttccgtagctttgcatcgcattgcggttcgtcgtgaccacgttcacggcatctttggcatcgtcgccaatcgggacaagtactgctttggtgctgattccaggcaccgcagtgttcacacttcatatttgaggttagtaatgtgaaaataaataactagatgcaagacagaacatacctcttttgctgggcagacatcggctatatggccctcattttgacattcgagacaagagatgggaagtttgaggtctagatcatggatgttacgatcaaaatagacgtacttcgcaaggatctcaaggtctgtctggcttagatccactaaagcaacaggcgcatttggatatttgattgagaaaagtcggaacgcttcctctttcgacccaggtccggattgtgtagatgtgcctgagtttccggtgttggacccatgctgatgggctagagtggcagggtcatagtcattgataccatccatcttgtcccctatgttcagcaggatagagtcatcagcttcagaaccaagagaatctgaatcatccgtgtcactcttggagtcaatttccccatcttccagctcaccgtcgtcttgaggttggttgtttgctgtgggcttgtcttcgccattggccgaaagagattcactgcgactgcgccaatatttatcattcacggcttcaaactgagtgggcttctcatcgggtggtgctggtcgttttccaagtgttgtgtgtactagagcggggttctcgtcggctggtgctgatcgttttccaagtgttgtgcgcactggagccttccgaccttggttccagctaattgcaggcgcggtgctaccggcatgtgggtttgcgacggtagttggggccgcattagaatcggaggctgaactagatccagagctagatgtgttgtctggatcatccactggcagtgaggtggcactgaatgcaacaccttttggaacaaagtcagctaggtccgagtccttatttctattgcggcgccgtctcttggtcgggcgggtgctgtcgcgggatgcggagcgcgaggaacgcggattggaccgagtgcgcggtgcgcccaccagggctgtgcgtgaatcagcctcttcatctgatggatttgccatttggttaatttaattggataatctggataaaaatatcgggagatagagtgagatagagtgagagagagtctggaaggatcaacagtagaatttgggtcccagagaatttcacggcagacgatatagaccactcgcgcaattccacaattggagtttacgacttcgggagatatatgaggcgataagttgtagaacccttggtttgcactccgataaggtttataaccttctttctgtagtatataggaaggaaactattggttgcttttgttttttgagaacagtatctcccaataaatcattacagagagcactagcagacctcgtctcggttgtatacaaccgagacacaaaagaaatcagataatacaagatagataactctaagatcaagtcaacaggtcaattgatcaatgtcaatatgatctagacatgatctagacggcaggcaggccactagccagtaaacccttttgaccggggttgcactcgtgacttcaacatcatatttagattcattcgggtattaatgatacagattatgagccaacacgccacctccaagggcgagtcattaaagctgcagtctgcgtaggatctacccgtaggaggcgatcgacgccaagagtggggttgatgtcatattcgtagtcccaaccgaatgttattatggatcttatggatcttatggatatccatcttaacccctcgttatggtttatggattgggctgatactgttgagtatctatgaactacagctaggtgaatgttcatagcccgcactcatccgcactcccatttgccagattaacgagttgattctaaactgacctggcagtgttggagaactacctagccagcaccagctcttactggataaaccaaagacccatctactcttatttgccggtgacataaaacgctacatataagcacggcaataccaaataatttgggcggaatccgagccagtgttcccgcgatcaactacctcggtttataacaaccgagtatcgggctcgtcatgtaggatgaaggcctctttccatgtcgataagatttgtggagctctacgacagcaccttcagaaacaagaacccggtacatgatttttgtattcaacaatgcagacctctcccatttcatagccattgagaagatgaccacctgccgtggcctagtggactaaatactatgtatcaacaatctttatcaactgttcatgacacctgttcagcattttgcccccggggataacacctcaatacgaagggaaagccggtggcttagcctgaagaagaccgtgccctaaacacggcagaatattgcatgctgccttttcactagaggtctcgaactcattgctattatgcaaacacataaggcccttggctttgaatgtatgattgcacaagaatagcttatgcatctgctaagaatctactatttggccaggtaacattagagattttatataagaacataccgacatattctatatgtatttctaggtctttcaatgtcttctgagatggcaaacgtggcaataagcataattaatttggcatagttgagtaaaggtggccaagtccatatttttagtcttttctatatgcatctatcgaagtctcaagccatattgccccataaaaggaaacgtcaacgataagaaacgtttcagatcttcataaaaccagaccaaaaagacaggatatatataggaaccttcccctttcctgaatccttgatataaagtacaatatagttttactcctttcgggctagattccgcacatgcatacgttttgtacatgggccaattatgcattttgcctctagttgctaggccaatcctgaaagtaggaaatagattagggagaaaaaagacccaatctaattatagacctctgatagaaaagcgagaaggaaaaaaaagatagtcccagcaagaaaaacgagaaaatacgtgaatcagagagctcttccgcaccccgtgaccgaaagccgatccgaccggcaaactcccagtctgggccgtgccacctcatccccacgctccttttcattcttctctccttctcttccaacttattcttttccttttggatccaaccgtcaagctggcgtccgacaattcaaaagtgtcttccctgttgaccccccgggggatatcctttcctccggatgttgacacagggccgcagcggttgtctccaaggatgacctcaaaacaaggccgccggaggcggtccagcagtcttatctaccaggaaccggccgaatctattgagcacactagtgatcaagccgcattgccaaacctgaatgcgaactgggtgaattccaagggtgagtgaccaaaaaaagccgatcctggagaccacatatcacaagatagagaagaaaacaaggactaacgtggaatcttatttcaattacaggtgcttggaccattcatttcgtgtgtatcgccgctctcaagatcttctacgacatcatccccggcgtctcgcaggaaacttcatggaccctcaccaatatcagctacatgttcggatctttcctcatgttccactgggtgcggggcatcccatttgaattcaacgccggtgcctatgacaatctcaacatgtgggagcagatcgacaacggcgatcagtatacgcccgctaagaagttcttgctctgcgtgcctatcgtgctcttcctcctcagcactcattacacccatttcgatttgacccacttcactatcaacttcctggccacattgggggtggtcattcctaagctgcctttcgtatgttatatctgctcgggagaagacttacgaatctcatttgctaacattctgattagtcgcatcggctgcgaataggtctcttctccgatatacccgaggagtcatagtggctcccatttaatctttccttttttttctcaccgataactacccatgttggcgtatccacggcctccttgatttcccgagctttctcgccttcccctccttttctccataaaaggcctttgcattgcgaatttgattgacgggggttgaaccgttcttggccaccgcgcatcctgtttctctttctttcgtgtcggcaaatatgaagagcagaagtcactgcgaatcagtctaaattcccatcctttcggtctgccctaggcagcttatccttgtctagatgttcaagtatccaagccctgcatattttaccctgcaagcatctattctctcgggtccctgctctgcctttgaaatgttgggcctgcgtaatgtaagggatcaacgtacctttgcaatttatgcacataaagtaagacattgtccctagagtaattaatgcatgtcaatctcttggctgtggcccatgcggggaggggctattgtctcattgtgtctagatataatccgatcaggatatcacttctagcaacattcgaatgattatgttcgaaggatacagacaaagagccaaaacaggcaaggatatcgtactgactacgtatataaagcccgtgagagaaattttctttcatctgccttttctaatattctttgtcttaatcctcaacgaaacctcaaaactcgaagagaatgtccatggttttgttcatgtcgagttttagccttgcatctgtttcggcgttcattcgttccttttatttactttttgacgagaatctttgaatttaaagaggcatataatatagtaaggcatgaagagaacatgaaaatacggtcctaatatcatattgacaatagatcagattaccaaagtcttacgcttatttgctttttttgtttaaaggaaccagaggaaggttccttccctattaccacccaagtacctatagcttcctcgattgtagatagcagtcttaacttcctacacggcttggtctaattctcaataaactagctatatcttcaccagctgagtcgtcagtgtttctctccactatggatcaaaaacctttgacagctttccccatatccttcctgaagacaatacatctcatcggttctctctcctggctgcaagtgctctacgcagtctcctacatcgtacgcccgttttggaacacacggcgcgagtttccaccattcaacagagccatcgatcgcacagaaaaaagcattatcaacaccatactcggcactattgcactctcagcccatagttctgaaatagaaacagagcgccagtggtacctttcatcgggaaatggcaccctgaacaacatgcgcaccacctcccaatccatccccagcttgctagtcacctcaccatggccaccggatgaacatcaagactcggattcctcattagagcaagaaagtcccacctcacagccgagcaccgaatctccccgagaaaacttccctatctatgaaaccgtgcgcaagctccgatctagcacacggggcagcatttcaaagctcgccaactcggcaaaatccatcttccgacagcctctgaccgttctgccacggaatatgggcgtcccctccccggatgaggaacgggccgagcgagacctgattccagtcccagtacacactgcgcagcctcacttcgtccagaacatggctttccccgcgcccatgtcggcctctgcacatatcacggatcactttagtgaccctggtccgtcgactggaagcaaggtgcaacagccagtctcgtttggggcgaccattgatgcggcagctgattctgatacggtgcagatgaatcgagcgcgcaagtatcaatctgtcgagagctatccgggaaagttccctgttagtgatacattggattatagctcgcttgctagcgcttatgctgttagagggagggggactacctccgttcgacctttctcggactactagggctttttttttggtgatgggcattctcattggcattgcgggtttcggagatgatatctccgtgacgattttggctgtttgactgaaggcttcgaattaggtcttttgatttgctttttaggacatgacatcagagtcagtcctgtacttgggtttctgctattcattatattcattaccaaagatcaggtctgtcaatcttgtcattcaatggaatttctatattttcgcagaattggctagttaccttcttttatagttaggtgagggtcgaaggatctgcttaatctggcgctttgcgattcaaactttcaccaaaacaaacaactcggtactgtaagtacgccgtccacggggactcatgcagtagccctgtcaattcctcgtcaatccaaggaagaaattgtcagttctttcattgtctgtatacttcccaccgcctttgtttccgctcgaaacaaagaagttcaatctttttatagaattagttgtcaacatttctcttagctactagccaatataaaggatagtatgtatttatcctaaatacctctagaacctactttggagtcctttctcttgcataatgtcacatatatcaacatccaactgcctcctgttctgccggacatatacacgtggacctctttcgacgcggacgcgccatccttatcgataagcgcgttactgccactatcttttcagctggcttttcaaaaaaaatcccccctctggccatggcaaccatggacgaggtaccataccggccacatgtgccccttcaatgggagctggctcgacagacagaaatcttcctcgaagatagcctatgtatgttcgcttttcccgtgttttgacgcgtgcgcaaaaaaacctcaaagagtcgctgctaatgatctccttctcaaccagggccgcaagcatatagccttctctttaatgtccttgcatcgggcactatcgcatcaacaaaagcagtgattccactgcctcggcatctggccgtcgcagctacgatgctggtgcacccaagaacaacaacgcgcgccgagacggagtacgaaaaggaagcatccaaagcagctttgcgatttctccgattgacgaattctcttgttggtcccacggatgcaaaatttaatctcgctttcggattcaaccagtttgcatctttgcgacctggtaggcggcgtgcggaaagcccgatgctcgctgagaatgacaatcctgataccaggcctctgaatacgaaattcgaccaggcttcttcggtgtggaactgcgcagaggacttctggcacgctgtcggttgggcatttaattgttcggtgcttcatccggcccggtgggagcgctggcagatatggctccagttcatgtgcaacgtactagaagatgattggaaagagtgcgaaaacaaggcggtacctgatgaccttagcatatttcgggaaagcctgatcttccgttatatctcctcaaactccacagctggacggaaccgcagaatcatgcgggcaatctttaccaatgccaaatcgaatcctggcgagttcaaggaggtattcaaagatgaattaagaatgcccgtccctaaacaagactcgcataatttaaagaagagagcaggtgatatcgacctcgacaagggtcactatggcgattaccagaacaatttcgacgatgatttcgaagctgatcaaagctcaacctcggtattagaatcgactgctaagccacgacgtagcaaacgaacccgacgaggaatgcgcaacgcagaggacgacgccacaaaccccattaagatggccaaagcaagccaatcatcctcccgcgaaagcaacaatctctccctactaggcggctacacttccatcggcctccgccaacaactcctcagcatcctctccaacgtttcggaaaaactgccgcgggacttcatgcccctagacgacctctacaacatgttcgtcgagaacattcgcgacctttcgctcccgatcttccaacacttcatcagcccctccaacccacacctcctacccgaagcgcactccacactctgcgaactcctcctcttcgtcatccgcgaaagctccgccccaagctctgatgccaagtaccttacccaggacaagctggagaaatgcttcctcccctatgcggcggctaccccaaccgtggagaacaatgccaagatctccattctgctcgaggcgctgatgacacacctgcacgagggaaagatgatctctgtgaccccatcgctgacggaagctgtcaactctgggattgcgcgtcgtgagaaggctagtcttgatcgggactcgcttgaatgggcttacttgaaggaaagtgggtttaggatgaagtttatggtcgagcatatcttaccgtgaagcgtttctgtaggatcggggatgaccggcgttgtggtaatgatgttaatggtggtaatgatacttaatgatcggatctcggggcgtttttcaagcgtttgaaatgccatttgattcttttcgggtttataattgttatgatatatacttagagaaatgcagattcttcctacttactgtgaaaggactatcctacgaatgtgtgatcaactgtgaaacgtatttttaaaatgtgtttaatatagagccttgagtataaattgctatctacaagcacatcgcgtcaaaaataaagaacaaaaaaccaagggcctgaagcgggaatcacacgcagataacacaataatccaccaacgcagaaatatgataataagtcttctgttccaatgatgatatccgcccacagaggcaggaggaaatgagcttagaagccgaagtagaaggagagaatagtaagagaatagaaggggcaaggagtcaaagaaacaagaaccctaggttgaataggtaggttcaaggagctgtcaacccaagtcaacgcttattgcggcggccggggcccaatgatctggcgcctagcaccaccaataccaaggccaagaccgccacggttctggttatcaccacccatatagccatactgatgaacatcccaggtctggcccggtccagagccctgggtgccatcttgggcgccacgctcggccacagccgccacttgtttctggttctccgcccactcttcctgacgcgcgcgttcgcgctccatctctcgttctagaagagacttggatgcccagccgccggccttggtcttctgctgtgcagctacgcggcggctattctcggcgtcgacttcggaggtcgtggtatagtcttggaaccggtgggtagctggcgctggggacgcgggtgctggattcgaggcgaggaagctatccacgcggctttcgtggcctcggttggcgttgtatgctactgggtctgggaggggccggggcgacttgggaaggtccctaggagggagcgtcggggttgtagagaaagacgatggctttggcactgggaggggacgagggactgggggtggtgcttgctcctggatgggttcgtgctcctctgcctcggaagcagcaggcatatcctgcgtgttctgccactccgtccggagaaggcgccgttcttgttcgagagaagagagatcatagctaggcttggcgggcacgggacgacgaggctgaggctgaggctgatcgccagtctttccaggctggacttcctgccgctcagtttcgtactggcgctctcggtcctttgccagctgtagctcgcgctcgagctctttgatgcggcggctttgggccgtttcctcgaccggccttgctacggcatcactaacctgggagttggaagcctggtactggctcaggaactgaccattgaggcggttatcattcaggcttcgtctctgttggcgttccttctcaaaccgggcctcggcttccttttcttccgccatacgtcgctgctcttctgcttcccattggcgcttctcttcgtcccagcgcttcttctctgcttccaccttgagacgttcttgctcccttgtacgggcagtctcttcttcccatcggcgctcctcttctgcctgggcacgagcctcctcttctgcaacctgtcgctggtgagcccgatctgcctcttccttctctgcgttctgttgacggatgcgttcgtcctcttcgcgcctgcgcttctctttctctgcaaggcttggtacagcaggtccgggagtggtaatctgtctgcgagcaccaaatgcaatcccttgattcccttggctagctcccccaatgtagccatactggtgaatgttccaagccggcgtggtaccctgctcatctccctttttggcccaagtactgtatgacccggagggtttcgcagggctgcctgtttgagagggaagggtccccccgacaatgctagaggagcgagcggatcggggtgtatatgctccgttgcttgaagaccccgtcgcatttgggctgattacaccgcgcttactctgcgggccaaccgttcggggaaacttgttgggcgcaagggtattggcccgccgactgaacgctgcgatacactggagaacctgcgccggatcctttgcttcgtatagatcaactgtcagaaagacatcgtgcggggggaggttgagcggtggcagttggcatgcgcgcaagaaatgcgaaatattctccatctgtacaaatggcgctgacaacttcttatacttcacgcctggtgacacagcgaggtttactagtcttgtgattaaggagttagccaggggtctagacccactacttgagaaacacagatacaacttacttgcaaagagcaatgccatctttcaggccttcgagtaagtctggcgatgccagtttctcatgcagcatttcctcaatccagtcgcgcacttccgcggctgcctgcggggtatagcgggataagcgcatattgcgcaagtccttgtccaacgaagtcactgaagccatgatgagtgcggaatactcgatgctcgagtttgttgaagtgtaggtagactgttgttgccacttggtatgtatccctttgccggtgcctgaccggccctaatggtggcggcgattgggtagcagaaggaaggcgttccgtgatacaattggtaatgacaagatgaagagaatatttcaattactagaagcgcagatgtttccagtaaagtcgtagaaatgaaaaaaagaaagagaagaaggtctagggatagagagaagatcgaacgggtggaatgttcgggctgtgtttatcccccgatgacgttccttgacatgccgtgcgcctagatcttttttttcgcctccttctattcttcacgctcaacgatggttaacagcttgtggttcaaatggaagaagcttcgcctgccctggcgaaagtccttcttggtcggtcagtatctgctttttgtttttctcgtgatgtctcagtaccgctaaccgtctctcaggtgaggatctcgctggaaataccttctgggagttcaaggatgtgttgaatgcatctcggttccgacgcattgttcgattcgatcccaaaactcatttgagtgatgttcaagtgacacgtaagtcccgtcggaagatgcaggctcgggcttggaccacattccctattccggggtaaagggaagtgagactattgaatcataactaacatgttgtttcaacacagcgcaatggtaccaatggttgcgacatgtccgagaacaccccccgagcatccaggagcagcaacaagatcttgtccgacaggcgcaaatcaaacaactcgctcgactcgccgatgaacgctgggccagcaaaccctccgtcctcgataagcccaagaatcatcaacaaccaccaacgacccagatcaacgaggcgaatttgaatcagcccgctaacgctgctcccgcacaaacagtaccggcttcaaccacatccgaacccgtaccgaagacacaaaaggtggagaacccatggggcaaggccaacaaaaccaacccaggtgaggagtggcaacctgaagcgtggactcctagttccaagcggtgaagatgatatcggcttattccggtcatctctccacaatgctatataagcttgactttcagagatgtgtgccggatggtagagaaggctgtcgccgtgccctgttggtcaatttacagcagaaacacatttcaaggaacccgggtcatagatggcattgaggctatctcatgctgaagagtctttgaactctacccgcgctcctttttgtgtgaggatagcggctattgtgcactatgttcaaccttacaggtcataacaggtgtggcccgacctgtctcgggggtttcaaaagaatgagagccatgtatattggcacttgtatattatgctattatagttttctattatctagcgttttccactcaatcttaccatccactaaaggtattctcgagccctgcaattatactctatatcctagtaaatctagtggctaggcacagtgttttttttatattttcaattttcctactctaacatataaatcaccccctttttggtttttgtatttttccatgctgcagcgcaagtgtcataaaaagacctcaccccccttttttgtatttttcaattgtcgcacttgttgcagcataggcacatctcaagcttgtaagaaaagcaaggatactgcacccttttttttgtcgttttatgtttttttccgtcgctttcatatcatgagcagtattccagctcaataaaagaagtcattgcgaaaatcatagctcagatgattccaaaaaggaatggagcatagcaggagggtgtcaaagtccagattccggaaagattggttagatcgtaacgtcaacaagaagatagaaaggtcaatggtcgatttagatgtagaccatgctgttctggcatgcgcttgccatggccaaggtagtacctctaaacttatcctcgttctggacttgcatgttgttgtcatggtagtaagccaagagatactttcgagcacgatcgcagaacttatcagccaggaaggcaggagtgctgtaactaatcgagcgagtagcgcgacccatcagataacagatattgtgggtaagttcttgcaacacatcagctggcttgcggtcagtattgaccttggggttggtgaagatctcatcgtggatgacaatgtagtgagccggacgagcggaaccctgaagaggagcctgggcttgtagatagaagtcccagtagataggacgggtaactccgcggtcaacaacacatccgttaatggggttagatgtccgatcttgatccttagcattggtagggtagaagcgcacgttatgacgctttccacagacaatgatggtaatgttgggcatggctccacggtataccgctttagcagcagcttgaaccttggggagttcctctgtaaggaccatggggaactgaccgtcgctgacaccgtcgcggtacacgagaatattctggggtaggttgccgttgttggtcttttgccacaagctcaaccgggtaagcatcatctccttgaggaattcaatgtgctcctgacggcgtgtctgggctcgaacctcaccgggccattgtcccatgttgtgatcggtggatgcaacgatggcagcaacactagggaagatttcggggtctgtgcttgacggatgagtgacatccaagccaacgaccatggtgttcttcgctgcactgataaagcgtgcgtttgccggctgcaggagttgattgcatcctcccatcttgaggttgaccttcatcgcgttgttactcaagtactgctcattggcacctctgaacttctcggatagcatgcagtgcgtaaggacgccagtcttaagatctccggcatacttgacgtaatcgaagattttgccttcagtggtaggaagcagaacaactaggaaggggaattctctcatgagcttcttgaatgcgtccttgatcatatcgcgattttgtctgtcatccgggccgagaaggactgagagatacggcttagaaggcggaggaagcgtcaggccatggtcacgcaatttcctgtagaaagcgtccatctcgatctcgggattcttcaaggcatcctcttttccgcgctttcgaagccaaagacagctccatttgctgatgctggcgccacgggcaaatttggtgccgatcaaattccacgagccgtttcgagggttggtagtcttcttgccgccatagagtagattgggaggattcaaaatccgtgcaggtacagtgatcatctccctgccgggcttgatccccactgtcttggtatgtcctccggagattcccattatgtccaatccctcagtcataatagagtcatagttctgaggaggccgccggcaactgaacttgatcatgttctgtcgttggacagcggacggctctggcttgaagcattgcccggggaggacttcgcaaacctctgcaggaaggtaaaccggacgttcacgggttccaacattcaccaccggcatatccttgctgtatttgagtgtcctgttgtaggctgttatttcctgttagcacaacgcaaaataccgagtgataggcagcaaacatactcttgaagaagtattcggtaatgctcatgtattttcccttcttgtcatctcccatccagaacttcacattgtccgcactagatgagaggttttcaatctgaggagggttggggccagggcgtccatcccgaggagtagcagttccgaggatcgttctgacagggtattccattaccccagctccgttctctcgacgctccagatgcaaggcatagactttcacacccttcaggtaccgattcaaaagctctcggtccgttccgtggacttgggcaaaagcaacaagtagctcagacagcatacccgaacggaagaatgcactatggctgacattcaaattaaggaagattcgtccagcaccaacacggacactcgagtagtaaccacgaacggcttcggcgccagccttcatgtccattgactgcttgcgcctgtccatccggaagaacttgttgcgtcccttgccgacgatggaaatgccggtatctttgtaaggatgagcactcatgaggatattcagtactcggagacagggcgcttcattctcaagttcctctcggtggttgacgttctcaaggcacgccatcatctcagccggggaataagagctgtcgagggtcaaagtggcttcccaggggccggtgtaggctttcgatttcccacctccatgtccgcctccgttgcccatggaacaagtgaatggctctctgccttcggggagtagctcggtagtaacaatctcagtagcgccatcggtggcaacgccaattcctttgttgaatagagggtacttgcggaacatactatcgagaacgaacttttgctgtgctttcttcgcctcgggcttgaccttgagccggtaagagtagaatctaacgttcggcttgaactccatggggaagaagttggcgcgaagcacaatcgcacgaccttgagtgccgtagccaggacgtcgagccaaagagttggactctgggcgaacctttgctgactccgtaacgtacttgtcctccaaggcctggaccctggtgctgggagcttcaattgggtccgacaacattctgtgcgcatgttagatataaatctttcctaatgtagaacaaataaacttacccagagggggcttcggacccgccacgtccaccaccgccgcgaccaccaccacggtcactgccacggccccgatcaccgctgtaaccgcggtcaccaccaccccggcctcgggagccaccacgatcaccaccgccacggccgcctcgaatgggcaaatcgtagccacgaccagacattttgacgagtgtctagttagagaaaagaggtagttgtaaaaaagaaatgattatgtgagaccgtgaactttgcacgtgtctgagaaagtaggataagcgacgaaaaggactcgaaacccctagttatttgggtatttcggagaggaaacgaggacagaaggaaggacggaagagtaggtttcaggaaaggacaagcgtaatcttgtccaccgcaggtttcctttttcagaaaaaaaaaagaaaaaaaggtcaaatgcaggttcgttgctctatcgttatgcattagtaacgatgaaaaattggtttgttgatatgcataaagatattgatgtaaactcagaaccatgcagcagagtaatgggtgatgtagggcatgcaatagcatgaggcaagtcgcccaacccacaaccaagagcgagccaatgggaatggaaatgcagtgacaatggagatagtgaggcaatgaagatgtaggactagatatcggatatgaagaactggatgatggtgcaagggaaaaagttcaagggaagacaaatggaaatcaaggtagaccaggaagaaacaaatgaacagcagcaaataagaatatcagaacaaatgctaggaggtatgcctgatctcaatgaagaggcaattggaagagagatttgttgcaaattagggcttggggcaaaggattcacagcaatcaaggggcgacaagcattaccatcaaagcagcaagtgagagatgcaagttaggggaagtgaattgcaagtgaagaattgataaagattaaagtaaggtaaatgcatatgcagtgaggaatacagagaggactggctcagtttgccaatatcagaggtactggcatgcgattgaagggtgtagagacatattagggcaaagaaacgaacaatgtactcaccaaagctgtttgtatgggtcgtggggaggaagaagaaggaagaggaagaaattgctggggatggtatatatagtcggccaccgcagtatgcgcgcgctggtagacttcaagaccatgaggcatgtaacgcgtgttggtggacttcaacttcaatatcatagagtatgcatgaaacgcgcgttagtagacctcaagctggttgatatgtaggacttagggcaaggacttgctacatggaacttataatatgagcctgatagtatggggtaggacttatagtatcagtatagaaggcttggaataaaaagcaagttagccatgaaaatccacagtacttagtactgatagtactagggcaacaaagaagaaatgaagctcaccagtccgacaaagaaagacacatactttaaagctcctggagctcaaaagaaaaaagataaaggaatacagcaaaagctaggtagtcacaaagtattatgaaattaggtatccacagaagagtctaactagatattatgataatctaacattttagggctgtaaacacccggcctaggcctgaaagcaaaaccacaaactccaaaagcaaaccagatattcccaatgatatagccctaaaacaccggctaaaaagaacagagacaaaaaaaaagcagaaggaaaacaaaatcaaaatcaaaaaggcttaacagagaacagcttcgagggcttcgacgtcgccgccagcgctgcgaacagctctcaatgcggcttcgctcagcttgcgacgtctatcgcgggcttcttgctcgcggcgagccttggtcttggaactgccagagggagcaactccggtcaggatcttcttgctgtcgtcggcagtaaagttgacgaacgatacgctgacagacttgtttgagcctcgggatgaggagctaggggccttggcgggcttgggggtattcatgctctggctggagagcttgcggctgtgtgtgcggcggtgggtgggcttggaaatggatccatggtgggtgtccctgggtgatgtgccggtcttgggagagagagatgatgatgaacgggagatttcgtggacttgggaggaggtgtaggaggtgtcgaatttttgagaggcggtagggagcatattagatgagaatgagtggtcggccgacatgtcatatgagggattgaattgaatcattagtcctccttgcatgatgtcattttggcttccaacgttttgcatgtggcggacaggtgtgggagatgcgaggtaagcggcctgctgttgagcgacccgagaaggcatgggggaccaccattgagattcctggccttggaggtctggggtgaaaggtagggatgaggcatggagagaatcggattgccaagaggagagagaatggaggtcggatgagtgagatgaagagaagatatcatcagcggaagaagggctggagttggtcaaagcggaagagcttgggtgagcaatgtagtgctgttgctgccgcgctgacattgcgatactcggcgactgcattggaactgacggagactggtgatatagccttgcgtcgtactgaggaggcatctctgccgagtctctagactggttcatgatttgttcggtaggcatgttctcatgctgaatgagggcatccgatggaggaggcgacagtggcaaacggtcttcggaattgtgaaggctgaagttctgaagtcgctgggcccaagcctcaggataggccatccttgatttggataggttggaagagcgcattaagctaggggagaaactttgcttgcgcagatgagagcgacgctcattcgggctgcggtggcggatagtcttgggagtgatgagagcactctgggtaggcttccgtctaggggtagctggaggggtagaaggcgagatagacagagcgtgtgttgctgtaggacgagagggaacttcaaagtggttcaggttgacatctgagatggcagaaggatggacggtgtcatggaaagcaaaatgatcggcagcaggtccgtcatactgcagggaccactcattactccagggttgcggtgattgatggcatttgggagtggagacagtgggtgcaagatcgccacagtcgtttgacagcgagtcaagcggaaagagctggtcaaactcggacaacgccgagtcttttccatcagcggcactagtttccatgttgacgtattggttgaacaagtcattgaacgaatggtcgtattgttgggcgaacatcttgccggatttccgtttgcggcgacaaagtaaaagtacggggcaaaagtgtagtcagcgactcaatacccgaaaggctttgatgtgattggataacaaagatatagtctcggaataagcttgggagagtttggggatagttcgggggaatcgacccggatatccgaggagtgcaaaggatgcaaaaagagggagaagcgtttgaatgtttggatgtttgatagtttgtcaatcaaagaaaacactgcagacgatgcaaagaaagcaaagcaaacaaacagatgcaagccctatttgaatagctgccagggacaccagcctcggaatttatggacacattcctcgtccatctttagagcacttggaatgtgctatagagggcccggttggctcctggtcggccccaccaacctccctcaagaatgcttcaaggctctcaaaccaatcgtagttgctggaaatacaatggctggccgagcagttaatctccgtcagatctaaaagacgcttcgtgtcggatagccacccacgggaatgcaaccctccttcactaagccagaagcagtggaacagccatcaaatgggttagtgaagcaggcctttaggggacttaggcatgttggccgataccttaattaaagatcgacatgactcgtacagagtacagagtaagagaacggccgtggaaatgggtcggaacgctctccgaaccgttcaggattgtccaaggaaccaggaccatacagcttggacagaatgatgatcacctatccaaggttggtacttgcagtgtaagcgtcatgatacctgatatcccatcatcaaccgcccgaaaagactcgagttgggtgacagtatgatcggccgtgcactgtggctgcatatttcttgcatttgcttcattatgattagccaattgatcaaatgggggtcggtaatgttgtcgattggtcaatgtcctgttagtgatagacggtccggaatgtgggttggaacgtagaggctgggcggaatgtcacctcccaccccgaacaatgcacagaagagttcttagtattcgagaagaatatgttttcctggaaagctccagtatgaatgttcccctgcttagaagttcggcgaaccttgacctgcaggagatcgccgtcccgggcccttattcgggagtgtttgcttcaaccccatgttctatatttggactgcatgaagatgatcaagataaggccatgtttgaatgcagtagaaaacaagcctttcctccgcatgagataaggatctgatacctcctttccccttcggtataatcgcgccatttagtggtcaaagtgtagtgtccttcaatcggtggggttttaggtggtttttggtacaaatctcagatgatattgattagccaattgtctttgggcgatttttaaatccgctaatagtctgtaatgcgttggtggcgtgtcaatgtgtatgtttcttcctttggcatcgatgtcgtgtttgagttgattcaggcatcacaaacaaagcagccaatattcaaacgaataaagatctaggcgagactgcaggattgacagacatatattgaaagagttaatatattgaaagagttaaaggacaagattcggtatagttgcagttcaaacccaaatcggccaatcagcagttgtgcctgtttcgtcaaacgcagtctaaggcgctaatgcagaatgcagactgccggcctgaataaaattaaaaatagagacagaaaaaaggggtaggtgtcaacaaaccaacgcgtcggcgagaagaagtggtctgcgaatatacgcgatgtgcgatctgggattgagatcgattgccctaacgatgcggcaatagcgggtggccccgttcaacaccatttgtatgcaatcagcaaggacagacttgataataagtcacagatacccctattaaacatgcagttattcaatatcatatgcctaggagtaaatagtaggaaatattgtgaaaatcctgagtgcgacactaaaaaaagcaaacccggctgagaggtactgtgtactccgcattccggtactcccgaggctattcaaaggccgatatagtgtactcagtactgtcacgagtagcatttggaggtataaccgagacaaacgatcaaatgcattcgaatgacctagaaataagttgcatatgactgcatattgtatcgaaagagcccaaacaaaatccccaaggtccagtggacggaccaagttcgggctgagtcagatgacgagaaattggggcgactgccctttcgattccagaaggaactctcctctctctttctcttccttttccccaggccactcgaaacagtgcccttggactattaattctctattactgttactgctactgcttctttgcagtgttccctcgcactttcctctgtactttgtgtcgttgccttgactccagagtcgacgtgactcaacccggatttatttgcccctccgtcacaccccgcgaaacgtgggacactcaactcttctctactttcatctccgctcttacctgccctcttgtcgcgtccttgtgcgataagcctttgtttttgcgacattgcgacccttgctgctctcgcgacattccaacgccgcttgcattgcgtcacgcgaacacaaattctctcctagccactttctaataccctacatgcatctcaacaaaacctgtggcctttttgttattcgtgaccgatatcaacttatttcgaatcattcaagcaaccagtctcgacactgttgcgcgcacccaaccggcaaggaagcacccttctacattcaatcataaagtgtatcaaaaaatcatgtctttcaacatttgtgctgggaacaagttcccctaaacttttacacgattcccgtgtgccttcactatgcacttttcaccgtgctttgcaggctttcgatgcccttgctattctcttgattcactctcgacttactgatatcaccttttcaacctcatttcttccacaaatccggtctctcctatagaggagtgctcggtcaaagcccagaatttcccaattcttgatatcttgggcaattcgccaaatcaccaaagaaagcgtcccactgaaagcatggacaacccaattactgagcaaatgagcaactcggccctccatcgaggctcgtgggaatctgtctcgtctgccttctcccacctcgagatgtctttttcccacgatagctgctatggctcggatgaagtttcggtcacatcgaatagttgcaccccaactcaatcaggtgtatcgactgctactaccaaaccgactttgcgtcctttcttgaaatcgatcctcaaaaactcaaccgttgcctttgactctgatgaagagtccggctcggagtcgggctatagctcagacggaattgattcggagtatgatgcattatctgatgaatccgacgaagaagatgacgatgatgattcggacttctcggtctgggatgaaacaaacggggatgtccctgagacgcatgaggatcacaccgagtcgtttgacgatgccttcatttcctttgaggagaattctgtgcgctttgacccgcaggtagagtacattgacagcgtggaagtatcggatgacgaaggtcctgatcaccaaatgacttgccatgaaatgatgatgcttgctcgggactcgaaaggcacccaaacacttctagatcaactcgataaaatggacatcgccgagtccagaaaagaacattgtcatcaagagtttggtcgcaaatctaccaaccaaccagaagagttttcccgcgatgccgtggacttggactgcagtctctttgtcgcttacatgaatggtatccgcgggattgttacaccgaagtacaagacttaccttcgagttcaggttgaccatattcgcttgggcaaggataccgaattcgtggatacagagggtgcgccttcgttgtatctcgacctagtctccaaccatgtcactggaaccttctgcaacctcctcgctgaggacgagctcaacgagttgatcagactccgcacagtagagcaagccggcaaacaaaacgatacaagctcgtcgaccctaggcttggatcaccaccaagtcctcttaaacaaaattgaaaaattcctgctggacaggttggcgagtggtcgggttgaaattggccctgatgaactgagcttcttcgctggcggcattgcgcacgaactcggtaccaaaacgttgcctgcacaggtctaagatctgcttgcacatcggcaaacaaataacacgactttacgattatgaccaaacatttctttcggattcgccgactatcagggcacacaatgggacggctctttagccaggaaaagcatttaaacttctcataagttgctttcggaataggttttgacagtggtcatgtattttcccgaactagcacttgatatgtattcaaaaaaaaacaatttcaaaacttcagatgttcgcaagttgatgattcaggtgtagctaaacctgtttttctgcctccgtgggactccgaccttgagtgcctagccaatcattctcattcactcctttccgacctaaaccccacctacaacatccgagtctcggacaaggcgagacggaaagaaaatgccagtcttgactcttaaatagtcgaagtataccatactgtaacaactgttcaacctcccttacccattttgagtcctagatactcaacgttttaaggttacactcactgtacatatacctatgtgttcttaaacatatgcacctattgctccgtgcttgcttaatattcacagtagtatgacgaagtatatatatcgtaccaccagctccgagttggatgtttcaaaagtctctaaatacatacccaatacacttatatttctaaccaaaatcaatatcagtatcacattacctaaagcccttttacacaacatggctaaacctataaatttcatacctatgcaggggttaaggaaaaaagatgctgtatcatttgtaccatttatgtgagaataccataaaggaacagtacctattgatctacagtaatactgtagttaaagattaattataacacgccattattctcctagaaatctcctagaaaatctcctgatacttctctaacacacctgatacgccaaccaagcccctttatcactagctggcaaagggcctagacactagtgggcgttccggcccggggaatttctatttttcttccctgcaggggagggatgggctgatgtatttttggacgaggcgtgtgctgtgcggagtaactgttttgtgaagaacgttgaagtattttgtatgtagatcatgggtatgcggagtacgtaactacggcttaacaagatcggttactactaaaccaccctatacaacatacaacataggagacttcaattttttatttttttttcactctcgttctcgttctctgtttctagtctccattccttcagaggtgggactttacatatgcaacggacttcatgcagacaagttatccacctagccccgtcaaaatcagcggggattatcagttgtttcatttgagggtgcaaacttggcagttagatgatgagtgacaggaaataatggatcagacggtatccagctccaccggttataagttcgatattgtatgtacggagtatgtagtcgggagttagtgctatgacgggtataacgcatatcttcatgcagtgaagatcacccggattggcatacgatagtacggagtataatccgtaaccttggatctatctcccaataacgctgctttcggaagaaatgtgaccgtttcgaagtgacatatcagataaacccaaaggtcaagttatcgactcgccgtttttaattaaatccgtcgatcacaacggcgtcgagcacagacagcacggggagaaacccaaaacccactgaggcgtagcatacggagtagctacggagtagggggctttcatttagacttttagaacgatgcggtgaatatgatctggccgaaatagactttgggctcctattctctctgtcattttttgcgtctgtcgtaccttgctgtcgatcattgacgatctcgagttcccttattcggatgatattctgctgtacggagtataatgtggttgatgatcgagcaaaatgaccatctgagtagcagtgcatacaatgtgctctgtataccgctgtgtcattctcgttatagatctcaagcatgaagagcctcacggagaaatacaccgatgaagaagaaatcgcggagatattcggccaaaaatccatcaatcgaataatcggttttctgctaacggcaggatcctgtggggccctgaaggattgtcaggaagggtttgacagctagggaacagagtggagtgtctttctttccgtatggggtacgtagactctaaaaatggagtttggggagcacggagaagggccagtcgctaggtgaaccaagttggttgatgacgattacgagtcatagtcatatccataactatggggttatcgggagtggaaatacagacacggctgagtaaaggcttattcgaatcagtgagaatgacaatattccaacgccggctaccacgtggtttgttaggcgatacggtgactcctgcgtgagattggatgaagctggtgcgtagacgatgttgtgggatgttgatgctgtacaagataagctgcttctagggctgaggggtggtacagaccagggaatatgcataaggataggatctgatatatcgctggatctatggagcagtgctgcaaggcgcgagaacaagttgtgcgctgtacatttattctttgctttttctgggattccggtagttggaaactcctgatcttctgcaggattaaggtgttatccgacaatgtgcattgttatcgttagttcctgctagtgcgcactacgttggagctgctggcaatagtcgcgaccctattgttcactgtcacataggcccacctgacccgagtcctgtcatctccgatgtatgaggtgggtaacggagtactccgcacattccgcaccttgtacacttgtattatccgttttcagctaactacaatatacaatatattaatagatggggctctcagcctctcattcgcttagacaggttcttcaaagaaattgattggaatggtcattccacgggtgagattcggcaaatgaagtgattggaggagccagagttgacagttgaatggttcagatcaggcactgcgcgtgacatagggggcctacaaggggaccgttgctgattgggggaatcgatataagtcgggataattgtctcagataggaaagcattccaaggcctggcaatataaaatgtatacgtaaagtttctagaaactgggaccgggtccccgtagcatggcatttgtgcaccacaggcttatcctcgtgtacccctgggagctgtggaacggctgaggaacgtgtggaaaaggatgttatgcgctaacaactgcactaccgaatgtgccccgtagtactccgtactagcgggtcatacctgaatgaggtacattgagatatcagatatcagaattgcaaataattccgggtccataccttgagagtgcatgcaatatatgtcctccgcgcatacagacaaacttcctttgaggaataatgacggaggccaaaaatcaataattataccagaaaggaaaggcgccaaagactaactgtgtccccgcccgaatccatgggacggcatgcaatgattggctgtccacgaccaatggggtctgaaacgaggtgcgagcggggcactttagcgtgctgatcgctgggacattgtcctgtgtttttttgcctgcgataggctttttctccgaatcagggggaagacggtcttgaatagctcaataagataggaattggaccgtacagtaactgtctaaacctgtatctatgtgagtaagttacatttcagagaaatagcctaattaaggtatggggtatacaaaacaaactgtaatcaggtaagattgtatgatgaatgtaagattgtaagatttgtatacacttgcaggtgctccataaatcatgccgtagtcgaccccgaatattcccaggtccccactgactcggatggaataattactcctgactctctttctcctggcctctacgggtcattctgtctcatcctctcgcttccttccactttccccatgccaatgcggtatgagcactgatcgcatctttgattcaaacgggtaagttggaaatccaccttccattgtcacgggggcccgtccagacgacgttgcgcatgcagtcgtacaagcccccgattccactcgagtcagatttcacccgcagaatcgtgtcagactgaccgtcctgggagtacaggatgatttgaaatttcgatttctacccagcgccttccggtccaaatcgaggtccgcgaaggaacacagaaaaagaggcaaacaaagctgtcaagtcgagccctcgacctaaatatacccggggtacacaatgcaatccttcaaaacacccgacttcttggagactggggccgtgtcccgttcgcgcagccccagtgtcgtttctagcgattcgcaattttctcgagtcaacctcatgtccccaccgtccgtgacgcccgctccagcattcatctcgccctctgcggcttcggatatcgtctctgccgaccaggagttcaacgccgctgattttgtcgccgaggatgaggaaaccggggccggcgccaccgcgctggtgaccccggccgcgctatcgctcctgaacggattcctcgataatctcttgtttaatatcctcgcttcgtccaagtcgacccagctcgcatgcattcgacccgccatggctgatgtgttgaagccccgcctggccaaggaagttgtagcctcggctgaagaagagttgggcgagtatatgggcggagcggacgatgagcagacggaattccgcggtggccaggagcccggcggcgattttgatctagtacgctcatggaagttaacccgtctacgatgcatggtctacacacggctgggcgatatggaagaggatgacgaagatgagtttattgcgcaggatagcctgggagagaccgatggagcaccccgcagattcagcagtcacgtcgacaatattacacccgcagcttctattttccttacctcgatcatcgaatacattggcgagcgggcactcgtcattgccggcgagacatcgcggtctcgtttgtcggcacaactcaacaatggcggtcctgagtttggatctggacatgagcggaaaagaatcgatcgacttgtggtggaagatctcgatatggagaagttggccctgaatgcaaccctgggtcgtctgtggcgcacgtggaggcagcgccgacgcggaaccaatctttctcgaacactatcccgtgaatcattccgcccacgtggatactcgctggcaaacagccgaaagagcagcattgtgaccatcgaggagccaataacgcccaaggagcctctccctgtggcgatgcccccgcctttggaccccgccactgtgcccttgccaacgagccattacgatgttcaagagatcgaggtccctggctatactggcgatctagatggggaggtacagaccatggaggccgttatcgctcacaaggtgcgaccgcgcagtctgatggtgttttcatcgccctcgcttgtcccaaaatctccaggttcagcaagcatctcgcccgtgagtacgtcagctattgaaattggcaatccaatccgtcatgtccgcacgaggtctctacctggtggggcacctacacccgacttcactgaggaggagccggagtggccgacagaccacccgtcacccactgcatcggagaaaaagcaactcgagactatgtacgaggatgatgaatcagcagaatatgtggatgcagctgaaaccagccctggcattgctatcacgacagaagaggaacaggaagagacaccacttatggaacctgtagaagaagcttccgaaattgcgagaatgtcgatcttgcatgaagaagaggaggagacacatcctgtcggggagacggttgcatcattgcacgctatcgcacaagctgaagacgctatgactgatcaatccaatagtcctcgcgtctccctcgtatccttgggtgatcggcggaatcagaaagacctagaagtgattgagggcactgggttatgcgaaaagcctaaattgacttcgacgatacaccgaccaaaacgacaaccctccaaggacgccagtctactgaatgcgaagtcgatctctgaacaaactagcgactctgaactgcaagccgttgcggagagtcagccttcagcgcaaggggttaagaccacgccggctccacccgcaccccccgtcgaggctatcacatctcgtaccgatcacgatgggacccctccgactcgaccatcagaggaatacaccgaaacagcaaaatctctttcccccgatatcatttgctcgacttctggttcaggtaattcgcagctatcgaaaacccgccccagaccttctccgttggaggtcacaaccaacaatcgaagctcctcttcctctacggttgaacgagccgctgttcaacgcatgtctcggccatcgtcatctatcaccactaaaacccgccggtctgggagcttcggcagtgctcgcgagaaaacgcgtccagtgactgccggctccactacctcgcaggtgtctagcaggtttaagggtatcatgaatcggccacagggtgaatctgggccgccccgcatgcgcagctcgtctgaaactagtcgcgcatctggcgggagcgtggactctgtagaagaacttgccgatttggacaagttgatcaacagcgacgagactatccattacactctcactccccgaagtgtgagggagatgacattccccaaacaacccaatcgttcagttcctcggtcagagacggcaggcgtctccgacctggctaatttcttaaataccactccgccaccaggggaagataagcaccgtcctcaaacctcggtttcctcaagagcaaccgaagagatgtctccaatttcccacaccagatccattgattcgcccaagcacatcccgcttaccacgcgcttgaccaacatgtcatcaacatcgaggtctagcaagattgggccggcgcgggatgcgcgagtcccaccctcggactcgacacgcgactttgcggatttcatgaaatcgactggtcctgctggtggggtaaacgagttcaaaccctctatctccgctgagggcacgcggtctgttcgtcctccatccgccgtctcttctgcctcccgtggaaaccgacctaagcttcaagctcggtctgctgagacgaaaggatctccgacctcggacctcattgacttcattcgcgagggacctcctatgcctgcaggtgctcaccggattcctcggacagttgcgcctttcaacgcccttgattcggatgatcttcagatggagaccaccacatccagttctttcgtcagcactgggaatgaatctacacccaataaatcattgacatctcttggttcgcggtccggcttgctggattcaaatcagaacaaggccccagcgtcgacaagcgccatggacttcgacgagcctcagccgcctgttcggaagcaacgccgtgctccagatccgtacgccattgacgacgatgacgatgacgcgtatctagaagagcttctggaacaggaacagaaccccaagcccaagcgcgaggaggagagcctgatggatttcctactcaacgctcctcctcccccttcctccgaacaacccccacagccatttgccgttcgtgctcctgcatcaaataatctctccggtgcatcgggcatgaaggcccgcttgctccgcacttctcataactccttgcgcacccaaaccgcccccaccaaggtccattctgactacgctaccaaggtcggtcagcagcgcaacaatggcaccctgccttctctctcaaatcgcccgaccaacaccggtgatttggcggatttcctccgaaataccggacctcctccagcccccgcgcgagcttcatcaacaccaatgggcgctaagacgaaggacggtagcttctcccgtttcttctcgcgtcgaaagaaggtcgaggcttagggttgaaatcctgacgacattctcgactgtcttgctttgctgagcgttccaatccatctaatgatctacatatcatgtccatcgctttgatattccttgtttgtgcgacaacactgcgatctttgtcattcctttcctctttatcttattcacatagagtcgtgtcctcgtttccttgctgttcgggtggctttttattatcttctttgcgcttgtgtgcgccattttattctctaccttctgcatgggacggaacaattaattcggacttcgggttttctattttgtccctttgtgggacgtcgctttgattgttttcgtggatttcgagataccatgcctatgtacctacactggggctatttttgtaccctgacattcagaaaccatttcattattctgtgaacattataactccaatacaagtaactactagacttacataaataaacaattagacctagcaataactatttgctgcgtgaaaagaatccctcggtcgaagtatagatcgtagaccgtaacaccggaacaaagttaatcccacactccccttaccaggtgtcatcaacagcagcaagcatccgtgtttacaaccgccaattccacgccgcaacaatgggcacctcaccaattacgctgagggccatcttcagcttcctttttgtcttcgtccagcttgccagcgcgctaaaattcgacctgatcgccacctccggcagcggcaagaacgagcgatgcattcgcaacttcgtctctaaggaccagctggtcgttgtcactgccatcgttggcggtacgaagggtgacggccagagggtcaacattcatgtatgtggacttatgtctggatgtggatgggaatccgtcctgcgtctgccgggactcggagaccaaaccgccgaattgcagattgcagattgtggatcgcgactaattcttccttttctgtgtatagatcaaggacgctatgggcaatgactacggtcgccctaaggatgtcgtcggagagacacgtcagcttttcacttcgcccgcggacacggctttcgacgtctgcttcgagaaccagcttgtcggccacagtaagtggtagtccctttgcacaacaccaacaatgcaccgaggaaaaggcggagttaaagagattgtcatgctaaaacaacattaccccatcagacaccatccagaacccctcccgccccgtcgaactcgacgtcgacattggcgccgacgcccgcgactggaacagcattcagtcgcaggagaagctcaagcccgttgaaacagacctacgccgcatcgaggagatggtcgccgatatcgtgactgagatggagtacctgcgtgcgcgtgagcagcgtctgcgtgataccaatgagagcaccaacgagcgcgtgaagtggttcgctttcggaactatgggcatgcttatcgggcttggtgcttggcaggttgtttacctgagagcttacttcaggtatgtgaaattgtggttgtggtggaaggtggagttggttactgactatttggttcttgtagatctaagcatcttatctagatttactagtccgtggaatggttgcatctttgatggttctttttttggtttttgcagcggttgcattgcaaatccttttgctctaacgtcgagtggcattctgttcaacagtcatgatctcaatgatataaaatgtacaccatgctttctgcagcctggcgctaataatattctctgtttatcgcttgtgttgtcctgggattgtggttagctatactttacagggtgcatcttcgaccttgtagtattacctgagtatttatggattaattatatagttctctatgtcggtaaagcactgcttaaatagtatgtgccttggtagatagccctggagggagcttccccagggcttctggtgcatgtgaggtcagtgtatacatctagattgacatctggtaaagggatcccgaggccgatgaagttaaaatatcagacaggccaagacgtcgaacaaatagtgtctcaattctaaagcccaaaaatagacataaagaactgcaccgtgtcgacaagtgtgtaattcacggcctctcagtggcctgccaggtcaatgtttagcattgcaaacagaacaaacaccgggcattgcaggagcttttcggttgcccgggcttattacgccggatgatgtcaaggccaagcatcactcatccctagaggaaaaaaaaagctcccaactccctctctataggacactttacaacaaaatgtccgccccacgtatactccatcgcctcgcgcgaccagtgccatcatccctaagcacaatcacaagactgaacggccaccgccaattcggcgcgacagctctccgtctcaaagatggcaacgacgaagctgcctctggggtaaaggcgcaccgcgccaaccagaccgacaaggtcccgaaccaattcgtgcccaacacaacctccactatgacaaaggacttccccagtgtcggcgagaagcccccgccaccggagatgctgaactcagccgaccccaactacagaccgtccgatccgtacccgggacggattgagcatttcaccggtggtcgtcaagacgatggagcgcgcaagcccgagcttgaagttggtgagatggagggtattacgtttaagattgagcctctgaagagggttggggaagatcttgtcacgaagagggcacgtctgctatgttcgtacccgtttccatgcatgctttgcacctcagtcccaaaccaaagccgaggacctggtgcatctatgtcaagaatgattgaagctaaccaattccactccagaccaaagccgcaagcgtggaatcctcgagtcggacctgctcctctcgactttcgcagatgtctacctgggcaagatggactacgatcagcttgtcgcgtatgacaacttcctcgatgagaacgactgggacatctactactgggccacgcaggacccgcctgaggatatctcacccgacgctcctaaggaggataccatcaccgagacttggaaggagaccggtgccaagagcggtgaatgggcgcagactattggcgctttcagagctgcttaccggcctattccgtcacgctggcaggactctgaggttctcacgctgctcagagagcatgttcgcgataagagcgctcttggctttgagaaggccaagaataagaagattggcggtggtaatggcttggggagaatgcctgatgttcaggtgttccactcgtaagggcctgtgaagagattgaactggatagtttgtcgatttcaaaactgtactatagttgtcatggccatgtttaattgtccataggaggcgtgtattaagaatgttgtatacctgatgatactgggatcaataggtgtaggattcacaataaggatagaaaataaagcgattgttaaattcgaataagacagacttagatgtaaatcaataattatccatctcaatatacatcgtagtccgtatagatccaggtcatgtgacccttcgcttagtattagggctccacggaaccacacaaggagagcagcgaagcggcttagggcttgggcgggcacgtctgcctcccatctcgattttacctccccccccagagtcaacgacaatctccgcccatccctctctctccttcattgtctcattcccatcatggctgagcagctggttcttcgcggcacccttgagggccacaatggctgggttacttccctcgccacctccctggagaagtaagagtgacctatcccgatcgggggattgaatttttgaagggacaaaattctgacttgaatgtttgataatagccccaacatgctgctgtccgcttcccgcgacaagaccctgatcatctggaacctcacccgtgatgagcaggcctacggttaccccaagcgcagcctcgagggtcactcgcacatcgtctctgactgtgtacgtttttcttctcccgaatgaaccacacccacaagccattggatgcgacacatggatttggatggcgcatttcggaaaaaaaaaagatggaatggttttggctgaccgatggtcttgtctgcgttataggtgatctcctccgatggtgcctacgctctgtccgcttcgtgggataagtctctccgtctctgggagctgtccaccggtaacaccacccgcactttcgtcggccacaccaacgatgttctgtccgtctcgttctccgccgacaaccgtcagatcgtctccggttcccgtgatcgctccatcaagttgtggaacacccttggtgactgcaagttcaccatcaccgagaagggccacaccgagtgggtttcctgcgttcgcttcagccccaacccccagaaccccgtcattgtctccgctggctgggacaagctcgtcaaggtacgctatcgattccgaattttcctacacaatttcctccccaccttgctttgcccgcgtgatgtttgcataaacgtatttgctacttcagagcccttcggggccatgagacaatttttcacccaatttgcctgatgggcacagcaacaatttttttgtttttttaaatcgaacgagagaaggattggaaaattttttccttgacacttgacattctttttttgagggtatcgacgctaacattcgatccgcgtctaggtttgggagctcgcttcttgccgtctccagaccgaccacatcggtcacaccggatacatcaacactgtcactatctcccccgacggatccctctgcgcctccggtggcaaggacggtaccaccatgctctgggatcttaacgagtccaagcacctctactccctctccgctggcgatgagatccacgctctcgtcttctcccccaaccgctactggctgtgcgctgccaccagcagctccatcaccatcttcgacctcgagaagaagagcaaggttgatgagctcaagcccgagttcgttgagaagggcaagaagagccgtgaccccgagtgcatcagcttggcctggtccgctgacggccagaccctgttcgccggttacaccgacaacaagatccgtgcctggggtgttatgtcgcgcgcatagatttgagttgttgtatcggagcttgaggagcctctttttgatctattgacaagggaattgaaaaaaagttcaaaagatacggccagaagcgcattggtttgggatgtatgagccacgagcaatgaagcacttctcgccgggacgaagtcgtccccggcctggaggttttctgacatgtctagcctactcgatccacatttaaaatgtatggaatcttgtgcaagacctgtgatgttctaataccagttaaggcatcaaaatgtttcctatttttctttattaaaaatctcttgtaaatcgtaccgtatggttatgttatatatctgtctcatttatcctcccacttgtgttctgaatcctgatgtagggcaatgctacgatagctgtcggatgtctaaattatatgtagaatggtttggagatttctatttccaacaatagtcataatgtacatttgaacagagggccctcacgtatctacccattatttctttccaagtctcttcaaagcctccttggccatcatacttccttcctcatatttaatcccatcagccaacgccttagcctcagtataccgctgcttagcgacttgtggcttcttctgtagctcagccaactccccaaggttatacgtcgcaaccacacatgtgatgtcacactcctcgtcacgtatcgggggtttaatgtgagccgcaacctcaatagccttctccgcccacttctgggcagcctcaacagtctgctccgctgtaacaggttcctgcggctgggccctggcaggcttttgaacctggccgactagagcggtagcaacatcgttcagcagcaccacctgtttgcaagatatagaagttccttcagcggcgcggatcaaatccaacgagcgcatatacagcggcatggctagctcatatcgctccttggcggtataggtagcggcaagctcggccagcgccgtcgctatctcagtaaggttcagccaggcctcgccgtctgccccctcgccactgctagcgctaccaacaggaaggcccagcatctggcggcggcgcatttccttcagacagatctccacagcagcgacctgcgcggcctcggctttcttctcgtcttgtatatactcgctggaataaagctcgccaagcttcatcgcaatgccgacgactttcttgagcgctttgtctcgctgacgagcctcgtactgcgccagtgcttgcagatcttcctggctttcttgaatcacctcgttgttaacctggacaatgggcgcggtcttctggacctgtcccttcgcttgcttcaccttctcggccgcggcagcagcgttacctgctgtgacttgctccacccagaccagagcctcgttcttcgttcgctccagcacatcaatcgccggcttcacaagtccggccttctccagcatcatagcaacctgaagcttgattccaaggatctcatctgagaacgggtgtatgcccatctcgaatgctgtgtgcagtgcctctctgtacgacttcatcgccttggctgggttgaggtcgatctcggtgtaatagatagccgtgcggagagcgtcggccaccggcggcgggaatttgtggtactgcggtccgacacgtgtcaattctacgtaggagatgtaggcaaagatgaaggctccgccgacaaccgagaagattgctagtggcatgaggacggggttcttgcgccagattcctctagatgcttcgcggtatttgcggctgattttctgcaggatcgtgaggtgccgtgtgccggagatgtaggggcttgcgagtggtttgccattgttgatgcggggttggagggttggtcgggtggtgctgttgatgtatattgagcgggcgaggctcttagattgtggttgtagaagttttgcggcaggcgcgctcgtgcgccgtgatgctgctcggaacattggggatgtgtgagtgggtattcggttgagatttcaagttttgattttgattgagcgggtgattgtctgatacaacctgggggattgacgaggatggagaggagatggaaaaggtatatggtgacgagagcccgccctcgattttctggtggtccaagctccgctccgccagatgacgtcgcccgctggagtatgcactcatctttccgcccattccgcctggaaaatgaactgttctcattcagctttaattgtgagacatcgctcttggatcagtctagtggtctaccctgataatgtgtgggcgatacgctttgggtgtggtaagctacggttcctacatctagactgtcctccagctgacgatcccaagcgcttggcgtatatccaacaacagctgcaggagcatggtatgcaagtggatgaagcaccggatgacgattcagtaagagagacatacaactttgcaccgggcaacttcggcgctgtctatcgcgctgagatcaccgataaaaagagccaacaagatgttgatagcgcgcaccaaaaccatgatttagaaaagggaaaagatgacgcgagctcggatgctaagtcagtagacaacacgattatcaaacacaagctccagagcatgaaatggggtctcattccattctggacgaagcgccagccagattacggatccatgatgcgcacgatcaactgtcgcgatgactcgctgatcgatgattcggggatatggactaccatgaaacgacgaaaaagatgcattgtcgtctgccagggcttttacgagtggctgaagaaggggcctgggggaaaggaaaaggttccacactttatccggcgcaaagacggagagctgatgtgctttgctggattatgggactgtgtttcctacgagggcatgccttctttctgatataaaacatcaagccgggctgacgattgcacaggttccgacgaaaagctctacacgtacacggtgatcacaacctcttctaattcctacttgaaattcctgcatgaccgtatgcccgtcattctggactctgggagtgaggcgatgaacaaatggctagacccccgccaaaagacctggtcaaaggagctccagtcaattctcaagccttacgagggtgaactagagtgctatcctgtccccaaagaggttggaaaagttggaaataattccccgaactttattgttcctgtcgacagcaaggaaaacaagagcaatattgcgaacttctttgccaacgcgaaaacgaaggagagtccaaacccctcttcaaaggagccgttgccgaaagtggagatggttaaggacgagcgccctactaagaattcagaatggagcgaggacaatgccccaataccggtgccagctgtcaaaagggagcatagtccagaggctcctgatgccgcgcaggaaagtaagaagcaaaaggtcgattcagatacaactaggccatcgccgcaaaagaagaagttgcgcagtgctacgcataatagccctatgaaaaagtcaagtgggacgaaggcagcagatgggtcgcagcgaattaccaatttcttcaagaaataatacacgcaatgaagcaagtgaaccttgcttctattattcggtcagccatgcttctcgctaatgtatatatatatttttttgtcaaatcaaagacgagaacaacatggtcgatttatatttaccagctgacatgtatctaatagattgagtgagctcagctccatgattgagttgaaaacagttcaatgcaagagaattgtcacgaacttttgagttcagcagcaaccgaatgcaagttgaaaagaaaaaaagagtagaccttcgagaggacttctgagtgaggatatatattacataggattccgtgggcgatgtacccgattttttgagatatcacttcgcaagctctcgtagcttctggaccagcttttctctgaggaaagaactcaatccgaaactatatcaaccaatcaacattggttactcatagataaaacatccaagaaagggggtacttacattccatctcgagtcaggatacgataggtacctgctaagtatcagcttggcctgttgagcctcatatcggaaaacataccactcggctggtaattgccattgtctccaacgaactgcccattggcatccacctcaaggctaccgaacatatcctctggcctgaatggaattagtatgaaataaaatgtacttgttgaaacacaagcaagcttaccaagcaatccgcccatagtcaggcggccgtctgttatcagaaatatgaatccaaccaccacgtccaccagagcctgcaccaccttgaccactagcaccactggtcgagtcggctccacgacgtctcccgcgctgaccggttagtaacacgccgcctgagttcaggttcgctccggccacagacaccatgacctgcgcctgcgacttggcatcggggtcttcatgcgcatattctgagcacacttcttgtacaatattcaggaatttggggttttccttgaaggtgtctgttgtcggtggcagttgagtcgcgagtccgatagctaggtctgggttgactggctcggggggtaataatgacaagatgtgggttccacttgctggtccagttgggaacacatactatgaataatttagcttcaaggagcgctttggaaggtgtaacaagcacatactatgtacggagacccttccaatgtcgatacacaacggaatcgagtccatttgggaagaacccgggcctgtcgtccaaacgctctggctgcaaacattgagatccaaatatagtaaggcagtgggtaactgagtaatggccttgcaggtagcaggtcggatataatcaaattcaagagagctggatcatagcttaatggaaatggcaggcggtttcgaaggcggtgaatataagccggaattaaagtggacctgaccagaaatacctaaagtagtctagcggggattgttgatatcagaaagttaaaaaaacattatagcctcataccaaagcgatggcagttgtgaaacaagtcggccggaaataagagaagccgttcctgctctcatgatcacgttaccattcaattaagcgagcccatgtcgttgtttgtctcatttgtgaatagtggc
